(19) United States
(12) Patent Application Publication
(10) Pub. No.: US 2010/0119550 A1
(43) Pub. Date: May 13, 2010

(54) RECOMBINANT MULTIVALENT VACCINE

(76) Inventors: Yasuyuki Gomi, Kagawa (JP); Michiaki Takahashi, Osaka (JP); Koichi Yamanishi, Osaka (JP)

Correspondence Address: PERKINS COIE LLP, P.O. BOX 1208, SEATTLE, WA, 98111-1208, US

(21) Appl. No.: 12/094,757

(22) PCT Filed: Nov. 24, 2005
(86) PCT No.: PCT/JP2005/021616

§ 371 Date: Dec. 28, 2009

(51) Int. Cl. A61K 39/00; C12N 7/01; A61K 45/00; C12N 15/74; C12N 1/21; C12N 5/071; C12N 15/64; A61P 31/04; A61P 37/04

(52) U.S. Cl. 424/229.1; 435/235.1; 424/93.2; 435/320.1; 435/252.33; 435/252.3; 435/325; 435/91.4

(57) ABSTRACT

The problems to be solved by the present invention are to provide: a recombinant varicella-zoster virus; a process for producing the same; a pharmacological composition containing a recombinant varicella-zoster virus; a vector containing a BAC vector sequence in the specific gene of a genomic gene of varicella-zoster virus; cells containing such a vector; a fragment capable of homologous recombination with a genome of varicella-zoster virus; a nucleic acid cassette containing the BAC vector sequence; and a multivalent vaccine. The above problems were solved by developing a process for producing a recombinant varicella-zoster virus, wherein the BAC vector sequence is inserted into a specific virus gene.

### BACKGROUND OF THE INVENTION

[0001] 1. Field of the Invention

[0002] The present invention relates to a recombinant varicella-zoster virus, particularly recombinant varicella-zoster virus prepared using BAC (bacterial artificial chromosome), and a pharmaceutical composition comprising such a virus. Further, the present invention relates to a vector comprising a varicella-zoster virus genome and a BAC vector sequence, and a cell containing such a vector. Further, the present invention relates to a method for producing a recombinant varicella-zoster virus. Further, the present invention relates to a nucleic acid cassette comprising a fragment capable of homologous recombination with a varicella-zoster virus genome, and a BAC vector sequence.

[0003] 2. Description of the Related Art

[0004] Varicella-zoster virus (VZV) is a virus which belongs to viruses of the family Herpesviridae, and is responsible for diseases (varicella and zoster) which exhibit two different presentations. Early infection to this virus causes varicella (chicken pox). Then, the virus latently infects the ganglia. After a long period of time, this virus is reactivated by some cause, and then presents as zoster, which is a symptom that presents when virus particles are formed; the virus particles arrive at the epidermic cells through a nerve cell and form varicella in the region where nerve cells are present.

[0005] The VZV genome is double-stranded DNA of about 125000 bases. The whole base sequence has been determined by Davison et al. It is known that at least 72 genes are present on the genome.

[0006] The development of VZV vaccine is difficult. Oka strain of VZV vaccine is the one and only vaccine for a varicella-zoster virus in the world, developed by Takahashi et al. (Japanese Laid-Open Publication No. 53-41202). The existing attenuated live varicella vaccine has been produced by employing virus derived from the attenuated live varicella virus Oka strain used as a seed, and has been practiced all over the world (Requirements for Varicella Vaccine (Live) Adopted 1984; Revised 1993: WHO Technical Report Series, No. 848, pp. 22-38, 1994). This Oka strain is obtained from a virus (Oka parental strain) isolated from an infected infant that presents typical varicella, by passage through several generations employing human diploid cells after passage through 12 generations, employing human embryonic lung cells at 34 centigrade, and through 11 generations by employing guinea-pig embryonic cells. The Oka original strain is of high pathogenicity. On the contrary, it is recognized that the Oka vaccine strain (Oka strain) has very little adverse effects in a normal child. As such, the Oka strain is useful as a vaccine strain having very little pathogenicity.

[0007] A virus vaccine has a possibility of changing its genotype of the virus through passage. There is also a possibility that the Oka strain has a genetic variety because a lot of passages are done in the process of preparing the Oka strain. Practically, to ensure its safety and effectiveness, considering genetic changes of a virus through passages in the process of producing a vaccine, a seed lot system has been established that limits the number of passages of a varicella seed virus which is approved to be produced, that is, employing a virus as a vaccine within 10 generations from the total number of passages, on the basis that the number of passages is 0 at the time of approval of seed.

[0008] On the other hand, from the follow-up of the effect of a varicella vaccine and post-marketing Surveillance (PMS) or in terms of epidemiology, the analysis of virological difference between a fresh field strain of varicella virus which is separated from a varicella patient by natural infection and a vaccine strain derived from the above-mentioned Oka strain has been necessary, resulting in that the various analyses employing the techniques from immunology, genetic engineering, and the like have been already done. For example, the judgment based on trials, such as the differences of gene structures, DNA base sequences, and the like between varicella virus strains (Journal of General Virology, 59, 660-668, 1986; 67, 1759-1816, 1986), presence of restriction enzyme Pst I site (Japanese Journal of Experimental Medicine, 59, 233-237, 1989), RFLP (Restriction Fragment Length Polymorphism) employing PCR (Polymerase Chain Reaction) (Journal of Virology, 66, 1016-1020, 1992), and the combination of the above-mentioned presence of Pst I site and RFLP (Journal of Clinical Microbiology, 33, 658-660, 1995), have been reported. Although these trials propose conditions for identifying a fresh field strain from the vaccine strain derived from the Oka strain, it lacks the reliability and is not conclusive because of the genetic variety of the Oka Strain itself, and therefore, there still exist problems in terms of quality control. Further, the method of identifying Oka strain of a varicella virus by employing the gene 14 region of a varicella virus (U.S. Pat. No. 6,093,535), the method of identifying a virus strain for an attenuated live varicella vaccine by employing the gene 62 region (International Publication No. WO 00/50603), and the like are also known. These techniques make it possible to identify the differences among the following three strains; the Oka strain of varicella virus (high virulent parent strain), a vaccine strain derived therefrom (an attenuated Oka strain), and a varicella virus strain other than the Oka strain. However, the criterion of preparation of an attenuated live varicella vaccine for quality control and quality assurance would not be sufficient.

[0009] As it is now, quality control by evaluating and identifying the quality of vaccine, such as by direct or quantitative gene analysis for genome DNA of seed virus and vaccine virus has not been practiced. Therefore, the accuracy of quality control and quality assurance of an attenuated strain for live vaccine cannot be calculated, and therefore, is ambiguous. Accordingly, to increase the accuracy of quality control and quality assurance is extremely important to secure and ensure the effectiveness, safety, and homogeneity of an attenuated live varicella vaccine. However, as mentioned above, the method for the foregoing has not been established, and the problems have still remained to be solved as tasks of pressing urgency.

[0010] Also, to develop an altered varicella-zoster virus vaccine which is superior to the Oka strain, recombinant varicella-zoster virus by mutagenesis, and a production method thereof has been desired.

[0011] In addition, in a method to produce a virus vaccine, comprising using a BAC vector sequence, it is necessary to identify a non-essential gene in which to introduce the BAC vector sequence. Further, when a multivalent vaccine is produced by employing a BAC vector, there still exists a problem in that it is necessary to insert genes encoding a variety of antigens into a virus genome.

[0012] It is required, consequently, to develop a vector derived from the BAC vector for producing multivalent vaccines.

### DISCLOSURE OF THE INVENTION

### The Problem to be Solved by the Invention

[0013] An object of the present invention is to increase the accuracy of quality control and quality assurance, and securing and ensuring the effectiveness, safety, and homogeneity of an attenuated live varicella vaccine. Some problems to be solved by the present invention include: developing a variant varicella-zoster virus vaccine superior to the Oka strain, establishing a method to produce a recombinant varicella-zoster virus by mutagenesis, and providing such a virus. A further problem is to provide multivalent vaccines having the above-mentioned advantages.

[0014] When the multivalent vaccine is produced using the BAC vector, it is necessary to insert a gene encoding a variety of antigens into a virus genome sequence. However, it is known when the size of the genome becomes too large due to the insertion of a foreign gene, the genome DNA cannot be packaged in a capsid, resulting in failure to produce a recombinant virus. In order to insert a number of antigen genes into the Oka vaccine strain, it is believed necessary to knockout a non-essential gene of the Oka vaccine strain to reduce the genome size.

[0015] On the other hand, it has been unexpectedly found in the present invention that among the genes which have hitherto been expected to be non-essential genes, there are genes that influence proliferation of viruses when knocked out.

[0016] The problem of the present invention is therefore to provide a method for producing a multivalent vaccine using a BAC vector, which presents no problems such as reduced production quantity of the virus.

### SUMMARY OF THE INVENTION

[0017] The present inventors developed a method to produce a recombinant varicella-zoster virus wherein a specific gene of varicella-zoster virus genome is used for the insertion sequence of a BAC vector sequence to create the present invention.

[0018] The present invention therefore provides the following:

1. A recombinant varicella-zoster virus, wherein at least part of a BAC vector sequence is inserted into a non-essential region of a varicella-zoster virus genome,

[0019] wherein the non-essential region is selected from the group consisting of the following regions:

[0020] the region in the ORF of gene 13, the region in the ORF of gene 56, the region in the ORF of gene 57, the region in the ORF of gene 58, the region flanking the ORF of gene 13, the region flanking the ORF of gene 56, the region flanking the ORF of gene 57, and the region flanking the ORF of gene 58.

2. The recombinant varicella-zoster virus of item 1, wherein at least two genes selected from the group consisting of gene 13, gene 56, gene 57, and gene 58 are deleted.
3. The recombinant varicella-zoster virus of item 1, wherein at least three genes selected from the group consisting of gene 13, gene 56, gene 57, and gene 58 are deleted.
4. The recombinant varicella-zoster virus of item 1, wherein the BAC vector sequence comprises recombinant protein dependent recombinant sequence.
5. The recombinant varicella-zoster virus of item 1, wherein the BAC vector sequence comprises a gene of a virus selected from the group consisting of mumps virus, measles virus, rubella virus, West Nile virus, influenza virus, SARS coronavirus, and Japanese encephalitis virus.
6. The recombinant varicella-zoster virus of item 1, wherein the BAC vector sequence comprises a gene of a virus selected from the group consisting of mumps virus, measles virus, and rubella virus.
7. The recombinant varicella-zoster virus of item 6, wherein the BAC vector sequence comprises a gene of the mumps virus, a gene of the measles virus, and a gene of the rubella virus.
8. The recombinant varicella-zoster virus of item 6, wherein the gene of mumps virus is selected from the group consisting of HN gene, F gene, and N gene.
9. The recombinant varicella-zoster virus of item 6, wherein the gene of measles virus is selected from the group consisting of H gene, F gene, and N gene.
10. The recombinant varicella-zoster virus of item 6, wherein the gene of rubella virus is selected from the group consisting of C gene, E1 gene, and E2 gene.
11. The recombinant varicella-zoster virus of item 1, wherein the varicella-zoster virus genome is derived from a wild type strain.
12. The recombinant varicella-zoster virus of item 1, wherein the varicella-zoster virus genome is derived from a mutant strain.
13. The recombinant varicella-zoster virus of item 1, wherein the varicella-zoster virus genome is derived from the Oka vaccine strain.
14. The recombinant varicella-zoster virus of item 1, wherein the varicella-zoster virus genome has mutations in gene 62 and gene 6.
15. The recombinant varicella-zoster virus of item 14, wherein gene 62 comprises at least the base substitutions of the following (a)-(d) in SEQ ID NO. 1:
(a) base substitution at position 2110 for G;
(b) base substitution at position 3100 for G;
(c) base substitution at position 3818 for C; and
(d) base substitution at position 4006 for G,
and, gene 6 comprises at least a base substitution at position 5745 for G, in SEQ ID NO.: 4.
16. A pharmaceutical composition comprising the virus of item 1.
17. The pharmaceutical composition of item 16, wherein the composition is in the form of a vaccine.
18. A vector which is isolated from the recombinant varicella-zoster virus of item 1.
19. A cell comprising the vector of item 18.
20. The cell of item 19, wherein the cell is a bacterial cell.
21. The bacterial cell of item 20, wherein the bacteria is E. coli.
22. The cell of item 19, wherein the cell is a mammalian cell.
23. The mammalian cell of item 22, wherein the mammalian cell is derived from a human.
24. A virus produced by the mammalian cell of item 22.
25. A pharmaceutical composition comprising the virus of item 24.
26. A method to produce recombinant varicella-zoster virus, comprising:

[0021] introducing a vector of item 18 into a mammalian host cell; and

[0022] culturing the mammalian host cell to produce recombinant varicella-zoster virus.

27. The method of item 26, wherein the mammalian host cell is derived from a human.
28. The method of item 26, further comprising a step of recombination between the two recombinant protein dependent recombinant sequences.
29. A method to introduce a mutation into the vector of item 18, comprising:

[0023] introducing the vector into a bacterial host cell;

[0024] introducing a plasmid vector comprising a fragment consisting of a portion of the varicella-zoster virus genome into the bacterial host cell, wherein the fragment has at least one mutation;

[0025] culturing the bacterial host cell; and

[0026] isolating a vector having a BAC sequence from the cultured bacterial host cell.

30. A method to introduce a mutation into the vector of item 18, comprising:

[0027] introducing the vector into a bacterial host cell;

[0028] introducing a first plasmid vector comprising a first fragment consisting of a portion of the varicella-zoster virus genome into the bacterial host cell, wherein the first fragment has at least one mutation;

[0029] introducing a second plasmid vector comprising a second fragment consisting of a portion of the varicella-zoster virus genome into the bacterial host cell, wherein the second fragment has at least one mutation, and the first fragment is different from the second fragment;

[0030] culturing the bacterial host cell; and

[0031] isolating a vector having a BAC vector sequence from the cultured bacterial host cell.

31. A nucleic acid cassette comprising a first fragment which can homologously recombine with the varicella-zoster virus genome in a bacterial cell, BAC vector sequence, and a second fragment which can homologously recombine with varicella-zoster virus genome in a bacterial cell,

[0032] wherein the both ends of the BAC sequence are linked to the first fragment and the second fragment, respectively, and

[0033] wherein each of the first fragment and the second fragment are independently derived from a region selected from the group consisting of the following regions of the varicella-zoster virus genome:

the region in the ORF of gene 13, the region in the ORF of gene 56, the region in the ORF of gene 57, the region in the ORF of gene 58, the region flanking the ORF of gene 13, the region flanking the ORF of gene 56, the region flanking the ORF of gene 57, the region flanking the ORF of gene 58, and the region in which gene 56, gene 57, and gene 58 are contiguous.
32. The nucleic acid cassette of item 31, wherein the first fragment and the second fragment are at least 1 kb.
33. The nucleic acid cassette of item 31, wherein the first fragment and the second fragment are at least 1.5 kb.
34. The nucleic acid cassette of item 31, wherein the first fragment and the second fragment are at least 2 kb.
35. The nucleic acid cassette of item 31, wherein the first fragment and the second fragment are at least 80% identical with a varicella-zoster virus genome sequence.
36. The nucleic acid cassette of item 31, wherein the first fragment and the second fragment are derived from different regions.
37. The nucleic acid cassette of item 31, wherein the BAC vector sequence comprises a recombinant protein dependent recombinant sequence.
38. The nucleic acid cassette of item 31, wherein the BAC vector sequence comprises a selectable marker.
39. The nucleic acid cassette of item 31, wherein the varicella-zoster virus genome is derived from a wild type strain.
40. The nucleic acid cassette of item 31, wherein the varicella-zoster virus genome is derived from a mutant strain.
41. The nucleic acid cassette of item 31, wherein the varicella-zoster virus genome is derived from the Oka vaccine strain.
42. The nucleic acid cassette of item 31, wherein the BAC vector sequence comprises the nucleic acid sequence set forth in SEQ ID NO.: 3.

[0034] The present invention provides recombinant varicella-zoster virus, and a production method thereof. For example, the present invention provides a method for: producing a recombinant varicella-zoster virus from a single viral strain using a BAC (bacterial artificial chromosome) using a particular gene of the virus as an insertion site for the BAC vector; and producing the recombinant varicella-zoster virus. Further, the present invention provides a pharmaceutical composition comprising recombinant varicella-zoster virus.

[0035] Further, the present invention provides a vector comprising a varicella-zoster viral genome and a BAC vector sequence, and a cell containing such a vector, and a nucleic acid cassette comprising a fragment capable of homologous recombination with a varicella-zoster virus genome, and a BAC vector sequence.

### BRIEF DESCRIPTION OF THE DRAWINGS

[0036] FIG. 1 is a schematic diagram showing the structure of the CMV promoter/enhancer.

[0037] FIG. 2 schematically shows a method for inserting the mumps virus antigen into an ORF region of gene 13 by homologous recombination.

### DESCRIPTION OF THE PREFERRED EMBODIMENTS

[0038] Hereinafter, the present invention will be described. It should be understood throughout the present specification that expression of a singular form includes the concept of their plurality unless otherwise mentioned. It should be also understood that the terms as used herein have definitions typically used in the art unless otherwise mentioned. Thus, unless otherwise defined, all scientific and technical terms have the same meanings as those generally used by those skilled in the art to which the present invention pertains. If there is contradiction, the present specification (including the definition) precedes.

### DEFINITION OF TERMS

[0039] The definitions of terms used herein are described below.

[0040] As used herein, the term “essential gene” in relation to varicella-zoster virus refers to a gene which is essential for the growth of the varicella-zoster virus. Also, the term “non-essential gene” in relation to varicella-zoster virus refers to a gene which is not essential for the growth of the varicella-zoster virus, and in the absence of which the varicella-zoster virus can grow. Examples of non-essential genes of human varicella-zoster virus include, but are not limited to: gene 11, gene 12, gene 13, gene 56, and gene 58. Among those genes, a suitable gene for insertion of BAC vector includes, but not limited to, e.g. gene 13, gene 56, and gene 58.

[0041] When a gene in a viral genome is an essential gene, the virus cannot grow in the absence of the gene. Therefore, by deleting an arbitrary gene in a viral genome and detecting the growth of the virus, it is possible to determine whether the gene is an essential gene or a non-essential gene.

[0042] As used herein, the term “wild strain” in relation to varicella-zoster virus refers to a varicella-zoster virus strain which is not artificially modified and is isolated from nature. An example of a wild strain includes, but is not limited to, Dumas strain identified by Davison, A. J. and Scott, J. E. (J. Gen. Virol. 67(Pt 9), 1759-1816 (1986). The nucleic acid sequence of Dumas strain is set forth in SEQ ID NO.: 5. The number of each ORF and the site thereof in the Dumas strain are described below.

| ORF | Reading frame | Site on | Number of amino |
|---|---|---|---|
| Name | direction | genome | acid residues |
| ORF1 | 3′→5′ direction | 589 to 915 | amino acid 1-108 |
| ORF2 | 5′→3′ direction | 1134 to 1850 | amino acid 1-238 |
| ORF3 | 3′→5′ direction | 1908 to 2447 | amino acid 1-179 |
| ORF4 | 3′→5′ direction | 2783 to 4141 | amino acid 1-452 |
| ORF5 | 3′→5′ direction | 4252 to 5274 | amino acid 1-340 |
| ORF6 | 3′→5′ direction | 5326 to 8577 | amino acid 1-1083 |
| ORF7 | 5′→3′ direction | 8607 to 9386 | amino acid 1-259 |
| ORF8 | 3′→5′ direction | 9477 to 10667 | amino acid 1-396 |
| ORF9 | 5′→3′ direction | 11009 to 11917 | amino acid 1-302 |
| ORF9A | 5′→3′ direction | 10642 to 10902 | amino acid 1-87 |
| ORF10 | 5′→3′ direction | 12160 to 13392 | amino acid 1-410 |
| ORF11 | 5′→3′ direction | 13590 to 16049 | amino acid 1-819 |
| ORF12 | 5′→3′ direction | 16214 to 18199 | amino acid 1-661 |
| ORF13 | 5′→3′ direction | 18441 to 19346 | amino acid 1-301 |
| ORF14 | 3′→5′ direction | 19431 to 21113 | amino acid 1-560 |
| ORF15 | 3′→5′ direction | 21258 to 22478 | amino acid 1-406 |
| ORF16 | 3′→5′ direction | 22568 to 23794 | amino acid 1-408 |
| ORF17 | 5′→3′ direction | 24149 to 25516 | amino acid 1-455 |
| ORF18 | 3′→5′ direction | 25573 to 26493 | amino acid 1-306 |
| ORF19 | 3′→5′ direction | 26518 to 28845 | amino acid 1-775 |
| ORF20 | 3′→5′ direction | 29024 to 30475 | amino acid 1-483 |
| ORF21 | 5′→3′ direction | 30759 to 33875 | amino acid 1-1038 |
| ORF22 | 5′→3′ direction | 34083 to 42374 | amino acid 1-2763 |
| ORF23 | 3′→5′ direction | 42431 to 43138 | amino acid 1-235 |
| ORF24 | 3′→5′ direction | 43212 to 44021 | amino acid 1-269 |
| ORF25 | 3′→5′ direction | 44148 to 44618 | amino acid 1-156 |
| ORF26 | 5′→3′ direction | 44506 to 46263 | amino acid 1-585 |
| ORF27 | 5′→3′ direction | 46127 to 47128 | amino acid 1-333 |
| ORF28 | 3′→5′ direction | 47052 to 50636 | amino acid 1-1194 |
| ORF29 | 5′→3′ direction | 50857 to 54471 | amino acid 1-1204 |
| ORF30 | 5′→3′ direction | 54651 to 56963 | amino acid 1-770 |
| ORF31 | 5′→3′ direction | 57008 to 59614 | amino acid 1-868 |
| ORF32 | 5′→3′ direction | 59766 to 60197 | amino acid 1-143 |
| ORF33 | 3′→5′ direction | 60321 to 62138 | amino acid 1-605 |
| ORF33.5 | 3′→5′ direction | 60321 to 61229 | amino acid 1-301 |
| ORF34 | 3′→5′ direction | 62171 to 63910 | amino acid 1-579 |
| ORF35 | 3′→5′ direction | 63977 to 64753 | amino acid 1-258 |
| ORF36 | 5′→3′ direction | 64807 to 65832 | amino acid 1-341 |
| ORF37 | 5′→3′ direction | 66074 to 68599 | amino acid 1-841 |
| ORF38 | 3′→5′ direction | 68668 to 70293 | amino acid 1-541 |
| ORF39 | 5′→3′ direction | 70633 to 71355 | amino acid 1-240 |
| ORF40 | 5′→3′ direction | 71540 to 75730 | amino acid 1-1396 |
| ORF41 | 5′→3′ direction | 75847 to 76797 | amino acid 1-316 |
| ORF42 + 45 | 3′→5′ direction | 76851 to 78038 | amino acid 1-747 |
| | | and | |
| | | 81538 to 82593 | |
| ORF43 | 5′→3′ direction | 78170 to 80200 | amino acid 1-676 |
| ORF44 | 5′→3′ direction | 80360 to 81451 | amino acid 1-363 |
| ORF46 | 5′→3′ direction | 82719 to 83318 | amino acid 1-199 |
| ORF47 | 5′→3′ direction | 83168 to 84700 | amino acid 1-510 |
| ORF48 | 5′→3′ direction | 84667 to 86322 | amino acid 1-551 |
| ORF49 | 5′→3′ direction | 86226 to 86471 | amino acid 1-81 |
| ORF50 | 3′→5′ direction | 86575 to 87882 | amino acid 1-435 |
| ORF51 | 5′→3′ direction | 87881 to 90388 | amino acid 1-835 |
| ORF52 | 5′→3′ direction | 90493 to 92808 | amino acid 1-771 |
| ORF53 | 3′→5′ direction | 92855 to 93850 | amino acid 1-331 |
| ORF54 | 3′→5′ direction | 93675 to 95984 | amino acid 1-769 |
| ORF55 | 5′→3′ direction | 95996 to 98641 | amino acid 1-881 |
| ORF56 | 5′→3′ direction | 98568 to 99302 | amino acid 1-244 |
| ORF57 | 3′→5′ direction | 99411 to 99626 | amino acid 1-71 |
| ORF58 | 3′→5′ direction | 99607 to 100272 | amino acid 1-221 |
| ORF59 | 3′→5′ direction | 100302 to 101219 | amino acid |
| | | | 1-305 |
| ORF60 | 3′→5′ direction | 101170 to 101649 | amino acid |
| | | | 1-159 |
| ORF61 | 3′→5′ direction | 103082 to 104485 | amino acid |
| | | | 1-467 |
| ORF62 | 3′→5′ direction | 105201 to 109133 | amino acid |
| | | | 1-1310 |
| ORF63 | 5′→3′ direction | 110581 to 111417 | amino acid |
| | | | 1-278 |
| ORF64 | 5′→3′ direction | 111565 to 112107 | amino acid |
| | | | 1-180 |
| ORF65 | 3′→5′ direction | 112332 to 112640 | amino acid |
| | | | 1-102 |
| ORF66 | 5′→3′ direction | 113037 to 114218 | amino acid |
| | | | 1-393 |
| ORF67 | 5′→3′ direction | 114496 to 115560 | amino acid |
| | | | 1-354 |
| ORF68 | 5′→3′ direction | 115808 to 117679 | amino acid |
| | | | 1-623 |
| ORF69 | 3′→5′ direction | 117790 to 118332 | amino acid |
| | | | 1-180 |
| ORF70 | 3′→5′ direction | 118480 to 119316 | amino acid |
| | | | 1-278 |
| ORF71 | 5′→3′ direction | 120764 to 124696 | amino acid |
| | | | 1-1310 |

[0043] In the above-described table, “5′→3′ direction” indicates that the ORF has the same direction as that of the nucleic acid sequence of SEQ ID NO.: 5. “3′→5′ direction” indicates that the ORF has a reverse direction with respect to that of the nucleic acid sequence of SEQ ID NO.: 5. By identifying a sequence homologous to the nucleic acid sequence and/or the amino acid sequence of the ORF, those skilled in the art can easily identify the ORF in the genome of a strain other than Dumas strain.

[0044] As used herein, the term “mutant strain” refers to a varicella-zoster virus strain which has a mutation due to mutagenesis, multiple subculturings or the like. Mutagenesis of a varicella-zoster virus strain may be either random mutagenesis or site-specific mutagenesis.

[0045] The terms “attenuated virus” as used herein is a type of a virus mutant strain and refer to the one that has lower virulence than wild strain. Two methods for deciding whether the virulence of a virus mutant strain is lower than that of wild strain or not (that is, the method for examining the pathogenicity of varicella-zoster virus) have been established.

[0046] As a method using an animal model, the method for evaluating the pathogenicity by producing a severe combined immunodeficient (SCID) mouse to which human skin is transplanted, and then, to infect the mouse with varicella-zoster virus is well-known (J. Viro 1. 1998 February; 72(2): 965-74).

[0047] On the other hand, as a method for evaluating the pathogenicity in vitro, the method for observing CPE (cytopathic effect) of melanoma after culturing for 7-8 days where a monolayer culture human melanoma is inserted to the lower layer and a cord-blood mononuclear cell (CBMC) which is infected with varicella-zoster cell virus is inserted to the upper layer of a two-layer well separated by a trans-well of pore size 3 μm, is also well-known (J. Virol. 2000 February; 74(4): 1864-70).

[0048] Although it is not the method for the pathogenicity directly from the study of the present inventors (J. Virol. 2002 November; 76 (22): 11447-59), which is understood to indicate that there are close relationships between the pathogenicity and the proliferation of a virus, it is also possible to evaluate the pathogenicity indirectly by examining the proliferation of cell-to-cell employing the infectious center assay.

[0049] The method for attenuating a virus artificially is well known. For example, a varicella-zoster virus comprises at least the base substitutions of the following (a)-(d) in the gene 62 in SEQ ID NO.5:

(a) base substitution at position 2110 for G;
(b) base substitution at position 3100 for G;
(c) base substitution at position 3818 for C; and
(d) base substitution at position 4006 for C,
and comprises at least a base substitution at position 5745 for G, in the gene 6 in SEQ ID NO. 8 is available as an attenuated virus.

[0050] In addition to the base substitutions of (a)-(d), instead of employing the above-mentioned varicella-zoster virus, an attenuated varicella virus which comprises at least one or more base substitutions of following (e)-(g):

(e) base substitution at position 1251 for G;
(f) base substitution at position 2226 for C; and
(g) base substitution at position 3657 for C,
is available.

[0051] In addition to one or more base substitutions of (a)-(g), instead of employing the above-mentioned varicella-zoster virus, an attenuated varicella virus which comprises at least one or more base substitutions of the following (h)-(o):

(h) base substitution at position 162 for C;
(i) base substitution at position 225 for C;
(j) base substitution at position 523 for C;
(k) base substitution at position 1565 for C;
(l) base substitution at position 1763 for C;
(m) base substitution at position 2652 for C;
(n) base substitution at position 4052 for C; and
(o) base substitution at position 4193 for C,
is available.

[0052] Alternatively, as an “attenuated virus”, a virus which comprises at least one or more base substitutions selected from the following group in the gene 62:

(a) base substitution at position 2110 for G;
(b) base substitution at position 3100 for G;
(c) base substitution at position 3818 for C;
(d) base substitution at position 4006 for G;
(e) base substitution at position 1251 for G;
(f) base substitution at position 2226 for G;
(g) base substitution at position 3657 for G;
(h) base substitution at position 162 for C;
(i) base substitution at position 225 for C;
(j) base substitution at position 523 for C;
(k) base substitution at position 1565 for C;
(l) base substitution at position 1763 for C;
(m) base substitution at position 2652 for C;
(n) base substitution at position 4052 for C; and
(o) base substitution at position 4193 for C, can be employed.

[0053] The terms “protein”, “polypeptide”, “oligopeptide” and “peptide” as used herein have the same meaning and refer to an amino acid polymer having any length.

[0054] The terms “polynucleotide”, “oligonucleotide”, and “nucleic acid” as used herein have the same meaning and refer to a nucleotide polymer having any length. Unless otherwise indicated, a particular nucleic acid sequence also implicitly encompasses conservatively-modified variants thereof (e.g. degenerate codon substitutions) and complementary sequences as well as the sequence explicitly indicated. Specifically, degenerate codon substitutions may be produced by generating sequences in which the third position of one or more selected (or all) codons is substituted with mixed-base and/or deoxyinosine residues (Batzer at al., Nucleic Acid Res. 19:5081 (1991); Ohtsuka et al., J. Biol. Chem. 260:2605-2608 (1985); Rossolini et al., Mol. Cell. Probes 8:91-98 (1994)).

[0055] As used herein, the term “gene” refers to an element defining a genetic trait. A gene is typically arranged in a given sequence on a chromosome. A gene which defines the primary structure of a protein is called a structural gene. A gene which regulates the expression of a structural gene is called a regulatory gene. As used herein, “gene” may refer to “polynucleotide”, “oligonucleotide”, “nucleic acid”, and “nucleic acid molecule” and/or “protein”, “polypeptide”, “oligopeptide” and “peptide”. As used herein, the term “open reading frame” or “ORF” in relation to a gene, refers to a reading frame which is one of three frames obtained by sectioning the base sequence of a gene at intervals of three bases, and has a start codon and a certain length without a stop codon appearing partway, and has the possibility of actually coding a protein. The entire base sequence of the genome of varicella-zoster virus has been determined, identifying at least 71 genes. Each of the genes is known to have an open reading frame (ORF).

[0056] As used herein, the term “region within an ORF” in relation to a gene in a varicella-zoster virus genome, refers to a region in which there are bases constituting the ORF in the gene within the varicella-zoster virus genome.

[0057] As used herein, the term “region flanking an ORF” in relation to a gene in a varicella-zoster virus genome, refers to a region in which there are bases existing in the vicinity of the ORF in the gene within the varicella-zoster virus genome, and which does not correspond to a region within the ORF of the gene or other genes.

[0058] As used herein, the term “homology” of a gene refers to the proportion of identity between two or more gene sequences. Therefore, the greater the homology between two given genes, the greater the identity or similarity between their sequences. Whether or not two genes have homology is determined by comparing their sequences directly or by a hybridization method under stringent conditions. When two gene sequences are directly compared with each other, these genes have homology if the DNA sequences of the genes have representatively at least 50% identity, preferably at least 70% identity, more preferably at least 80%, 90%, 95%, 96%, 97%, 98%, or 99% identity with each other.

[0059] Similarity comparison and homology calculation of base sequences are herein performed using BLAST (sequence analyzing tool) with the default parameters.

[0060] As used herein, the term “expression” of a gene, a polynucleotide, a polypeptide, or the like, indicates that the gene or the like is affected by a predetermined action in vivo to be changed into another form. Preferably, the term “expression” indicates that genes, polynucleotides, or the like are transcribed and translated into polypeptides. In one embodiment of the present invention, genes may be transcribed into mRNA. More preferably, these polypeptides may have post-translational processing modifications.

[0061] Amino acids may be referred to herein by either their commonly known three letter symbols or by the one-letter symbols recommended by the IUPAC-IUB Biochemical Nomenclature Commission. Nucleotides, likewise, may be referred to by their commonly accepted single-letter codes.

[0062] As used herein, the term “fragment” refers to a polypeptide or polynucleotide having a sequence length ranging from 1 to n−1 with respect to the full length of the reference polypeptide or polynucleotide (of length n). The length of the fragment can be appropriately changed depending on the purpose. For example, in the case of polypeptides, the lower limit of the length of the fragment includes 3, 4, 5, 6, 7, 8, 9, 10, 15, 20, 25, 30, 40, 50 or more nucleotides. Lengths represented by integers which are not herein specified (e.g., 11 and the like) may be appropriate as a lower limit. For example, in the case of polynucleotides, the lower limit of the length of the fragment includes 5, 6, 7, 8, 9, 10, 15, 20, 25, 30, 40, 50, 75, 100, 200, 300, 400, 500, 600, 600, 700, 800, 900, 1000 or more nucleotides. Lengths represented by integers which are not herein specified (e.g., 11 and the like) may be appropriate as a lower limit.

[0063] A polypeptide encoded by a gene in a BAC vector may have at least one (e.g., one or several) amino acid substitution, addition, and/or deletion or at least one sugar chain substitution, addition, and/or deletion as long as they have substantially the same function as that of a corresponding naturally-occurring polypeptide.

[0064] As used herein, the term “sugar chain” refers to a compound which is made up of a series of at least one sugar unit (a monosaccharide and/or its derivative). When two or more sugars unit is linked, the sugars unit is linked by dehydrocondensation due to glycosidic bonds. Examples of such a sugar chain include, but are not limited to, polysaccharides contained in organisms (glucose, galactose, mannose, fucose, xylose, N-acetylglucosamine, N-acetylgalactosamine, sialic acid, and complexes and derivates thereof), and degraded polysaccharides, sugar chains degraded or induced from complex biological molecules (e.g., glycoproteins, proteoglycan, glycosaminoglycan, glycolipids, etc.), and the like. Therefore, the term “sugar chain” may be herein used interchangeably with “polysaccharide”, “carbohydrate”, and “hydrocarbon”. Unless otherwise specified, the term “sugar chain” as used herein includes both a sugar chain and a sugar chain-containing substance.

[0065] It is well known that if a given amino acid is substituted with another amino acid having a similar hydrophobicity index, the resultant protein may still have a biological function similar to that of the original protein (e.g., a protein having an equivalent enzymatic activity). For such an amino acid substitution, the hydrophobicity index is preferably within ±2, more preferably within ±1, and even more preferably within ±0.5. It is understood in the art that such an amino acid substitution based on hydrophobicity is efficient. A hydrophilicity index is also useful for modification of an amino acid sequence of the present invention. As described in U.S. Pat. No. 4,554,101, amino acid residues are given the following hydrophilicity indices: arginine (+3.0); lysine (+3.0); aspartic acid (+3.0±1); glutamic acid (+3.0±1); serine (+0.3); asparagine (+0.2); glutamine (+0.2); glycine (0); threonine (−0.4); proline (−0.5±1); alanine (−0.5); histidine (−0.5); cysteine (−1.0); methionine (−1.3); valine (−1.5); leucine (−1.8); isoleucine (−1.8); tyrosine (−2.3); phenylalanine (−2.5); and tryptophan (−3.4). It is understood that an amino acid may be substituted with another amino acid which has a similar hydrophilicity index and can still provide a biological equivalent. For such an amino acid substitution, the hydrophilicity index is preferably within ±2, more preferably ±1, and even more preferably ±0.5.

[0066] The term “conservative substitution” as used herein refers to amino acid substitution in which a substituted amino acid and a substituting amino acid have similar hydrophilicity indices or/and hydrophobicity indices. For example, conservative substitution is carried out between amino acids having a hydrophilicity or hydrophobicity index of within ±2, preferably within ±1, and more preferably within ±0.5. Examples of conservative substitution include, but are not limited to, substitutions within each of the following residue pairs: arginine and lysine; glutamic acid and aspartic acid; serine and threonine; glutamine and asparagine; and valine, leucine, and isoleucine, which are well known to those skilled in the art.

[0067] As used herein, the term “variant” refers to a substance, such as a polypeptide, polynucleotide, or the like, which differs partially from the original substance. Examples of such a variant include a substitution variant, an addition variant, a deletion variant, a truncated variant, an allelic variant, and the like. Examples of such a variant include, but are not limited to, a nucleotide or polypeptide having one or several substitutions, additions and/or deletions or a nucleotide or polypeptide having at least one substitution, addition and/or deletion. The term “allele” as used herein refers to a genetic variant located at a locus identical to a corresponding gene, where the two genes are distinguished from each other. Therefore, the term “allelic variant” as used herein refers to a variant which has an allelic relationship with a given gene. Such an allelic variant ordinarily has a sequence the same as or highly similar to that of the corresponding allele, and ordinarily has almost the same biological activity, though it rarely has different biological activity. The term “species homolog” or “homolog” as used herein refers to one that has an amino acid or nucleotide homology with a given gene in a given species (preferably at least 60% homology, more preferably at least 80%, at least 85%, at least 90%, and at least 95% homology). A method for obtaining such a species homolog is clearly understood from the description of the present specification. The term “ortholog” (also called orthologous genes) refers to genes in different species derived from a common ancestry (due to speciation). For example, in the case of the hemoglobin gene family having multigene structure, human and mouse α-hemoglobin genes are orthologs, while the human α-hemoglobin gene and the human β-hemoglobin gene are paralogs (genes arising from gene duplication). Orthologs are useful for estimation of molecular phylogenetic trees. Usually, orthologs in different species may have a function similar to that of the original species. Therefore, orthologs of the present invention may be useful in the present invention.

[0068] As used herein, the term “conservative (or conservatively modified) variant” applies to both amino acid and nucleic acid sequences. With respect to particular nucleic acid sequences, conservatively modified variants refer to those nucleic acids which encode identical or essentially identical amino acid sequences. Because of the degeneracy of the genetic code, a large number of functionally identical nucleic acids encode any given protein. For example, the codons GCA, GCC, GCG and GCU all encode the amino acid alanine. Thus, at every position where an alanine is specified by a codon, the codon can be altered to any of the corresponding codons described without altering the encoded polypeptide. Such nucleic acid variations are “silent variations” which represent one species of conservatively modified variation. Every nucleic acid sequence herein which encodes a polypeptide also describes every possible silent variation of the nucleic acid. Those skilled in the art will recognize that each codon in a nucleic acid (except AUG, which is ordinarily the only codon for methionine, and TGG, which is ordinarily the only codon for tryptophan) can be modified to yield a functionally identical molecule. Accordingly, each silent variation of a nucleic acid which encodes a polypeptide is implicit in each described sequence. Preferably, such modification may be performed while avoiding substitution of cysteine which is an amino acid capable of largely affecting the higher-order structure of a polypeptide.

[0069] In order to prepare a BAC vector containing a gene encoding a functionally equivalent polypeptide, amino acid additions, deletions, or modifications can be performed in addition to amino acid substitutions. Amino acid substitution(s) refers to the replacement of at least one amino acid of an original peptide chain with different amino acids, such as the replacement of 1 to 10 amino acids, preferably 1 to 5 amino acids, and more preferably 1 to 3 amino acids with different amino acids. Amino acid addition(s) refers to the addition of at least one amino acid to an original peptide chain, such as the addition of 1 to 10 amino acids, preferably 1 to 5 amino acids, and more preferably 1 to 3 amino acids to an original peptide chain. Amino acid deletion(s) refers to the deletion of at least one amino acid, such as the deletion of 1 to 10 amino acids, preferably 1 to 5 amino acids, and more preferably 1 to 3 amino acids. Amino acid modification includes, but are not limited to, amidation, carboxylation, sulfation, halogenation, truncation, lipidation, alkylation, glycosylation, phosphorylation, hydroxylation, acylation (e.g., acetylation), and the like. Amino acids to be substituted or added may be naturally-occurring or nonnaturally-occurring amino acids, or amino acid analogs. Naturally-occurring amino acids are preferable.

[0070] As used herein, a nucleic acid form of a polypeptide refers to a nucleic acid molecule capable of expressing a protein form of the polypeptide. This nucleic acid molecule may have a nucleic acid sequence, a part of which is deleted or substituted with another base, or alternatively, into which another nucleic acid sequence is inserted, as long as an expressed polypeptide has substantially the same activity as that of a naturally occurring polypeptide. Alternatively, another nucleic acid may be linked to the 5′ end and/or the 3′ end of the nucleic acid molecule. The nucleic acid molecule may be a nucleic acid molecule which is hybridizable to a gene encoding a polypeptide under stringent conditions and encodes a polypeptide having substantially the same function as that polypeptide. Such a gene is known in the art and is available in the present invention.

[0071] Such a nucleic acid can be obtained by a well known PCR technique, or alternatively, can be chemically synthesized. These methods may be combined with, for example, site-specific mutagenesis, hybridization, or the like.

[0072] As used herein, the term “substitution, addition or deletion” for a polypeptide or a polynucleotide refers to the substitution, addition or deletion of an amino acid or its substitute, or a nucleotide or its substitute, with respect to the original polypeptide or polynucleotide, respectively. This is achieved by techniques well-known in the art, including a site-specific mutagenesis technique, and the like. A polypeptide or a polynucleotide may have any number (>0) of substitutions, additions, or deletions. The number can be as large as a variant having such a number of substitutions, additions or deletions which maintains an intended function. For example, such a number may be one or several, and preferably within 20% or 10% of the full length, or no more than 100, no more than 50, no more than 25, or the like.

[0073] The structure of polymers (e.g., polypeptide structure) may be described at various levels. This structure is generally described in, for example, Alberts at al., Molecular Biology of the Cell (3rd Ed., 1994), and Cantor and Schimmel, Biophysical Chemistry Part I: The Conformation of Biological Macromolecules (1980). General molecular biological techniques available in the present invention can be easily carried out by the those skilled in the art by referencing Ausubel F. A. at al. eds. (1988), Current Protocols in Molecular Biology, Wiley, New York, N.Y.; Sambrook J. et al., (1987) Molecular Cloning: A Laboratory Manual, 2nd Ed., Cold Spring Harbor Laboratory Press, Cold Spring Harbor, N.Y., or the like.

[0074] When mentioning genes in the present specification, “vector” refers to an agent which can transfer a polynucleotide sequence of interest to a target cell. Examples of such a vector include vectors which are capable of self replication or capable of being incorporated into a chromosome within host cells (e.g., prokaryotic cells, yeast, animal cells, plant cells, insect cells, whole animals, and whole plants), and contain a promoter at a site suitable for transcription of a polynucleotide of the present invention.

[0075] The term “BAC vector” refers to a plasmid which is produced using F plasmid of E. coli and a vector which can stably maintain and grow a large size DNA fragment of about 300 kb or more in bacteria, such as E. coli and the like. The BAC vector contains at least a region essential for the replication of the BAC vector. Examples of such a region essential for replication include, but are not limited to, the replication origin of F plasmid (oriS) and variants thereof.

[0076] As used herein, the term “BAC vector sequence” refers to a sequence comprising a sequence essential for the function of a BAC vector. Optionally, the BAC vector sequence may further comprise a “recombinant protein-dependent recombinant sequence” and/or a “selectable marker”.

[0077] As used herein, the term “recombinant” in relation to nucleic acid is used interchangeably with the term “homologous recombination”, and indicates that two different homologous nucleic acid molecules encounter each other, crossover occurs, and a new combination of nucleic acid is generated. As used herein, homologous recombination includes both “recombinant protein-dependent recombination” and “recombinant protein-independent recombination”. The term, “recombinant protein-dependent recombination” refers to homologous recombination which occurs in the presence of a recombinant protein, but not in the absence of a recombinant protein. The term “recombinant protein-independent recombination” refers to homologous recombination which occurs irrespective of the presence or absence of a recombinant protein. As used herein, the term “recombinant protein-dependent recombinant sequence” refers to a sequence which causes recombinant protein-dependent recombination. The term “recombinant protein-independent recombinant sequence” refers to a sequence which causes recombinant protein-independent recombination. The recombinant protein-dependent recombinant sequence causes recombination in the presence of a recombinant protein, but not in the absence of a recombinant protein. A recombinant protein preferably acts specifically on a recombinant protein-dependent recombinant sequence, and does not act on sequences other than the recombinant protein-dependent recombinant sequence.

[0078] Examples of representative pairs of a recombinant protein-dependent recombinant sequence and a recombinant protein include, but are not limited to: a combination of a bacteriophage P1-derived loxP (locus of crossover of P1) sequence and a Cre (cyclization recombination) protein, a combination of Flp protein and FRT site, a combination of φC31 and attB or attP (Thorpe, Helena M.; Wilson, Stuart E.; Smith, Margaret C. M., Control of directionality in the site-specific recombination system of the Streptomyces phage φC31, Molecular Microbiology (2000), 38 (2), 232-241.), a combination of resolvase and res site (Sadowski P., Site-specific recombinases: changing partners and doing the twist, J. Bacteriol., February 1986; 165 (2) 341-7) (generally, Sauer B., Site-specific recombination: developments and applications., Curr. Opin. Biotechnol., 1994 October; 5 (5): 521-7).

[0079] As used herein, the term “selectable marker” refers to a gene which functions as an index for selection of a host cell containing a BAC vector. Examples of a selectable marker include, but are not limited to, fluorescent markers, luminiscent markers, and drug selectable markers. An example of a “fluorescent marker” is, but is not limited to, a gene encoding a fluorescent protein, such as a green fluorescent protein (GFP). An example of a “luminiscent marker” is, but is not limited to, a gene encoding a luminescent protein, such as luciferase. An example of a “drug selectable marker” is, but is not limited to, a gene encoding a protein selected from the group consisting of: dihydrofolate reductase gene, glutamine synthase gene, aspartic acid transaminase, metallothionein (MT), adenosine deaminase (ADA), adenosine deaminase (AMPD1, 2), xanthine-guanine-phosphoribosyltransferase, UMP synthase, P-glycoprotein, asparagine synthase, and ornithine decarboxylase. Examples of a combination of a drug selectable marker and a drug include: a combination of dihydrofolate reductase gene (DHFR) and methotrexate (MTX), a combination of glutamine synthase (GS) gene and methionine sulfoximine (Msx), a combination of aspartic acid transaminase (CAD) gene and N-phosphonacetyl-L-aspartate) (PALA), a combination of MT gene and cadmium (Cd2⁺), a combination of adenosine deaminase (ADA) gene and adenosine, alanosine, or 2′-deoxycoformycin, a combination of adenosine deaminase (AMPD1, 2) gene and adenine, azaserine, or coformycin, a combination of xanthine-guanine-phosphoribosyltransferase gene and mycophenolic acid, a combination of UMP synthase gene and 6-azaulysine or pyrazofuran a combination of P-glycoprotein (P-gp, MDR) gene and multiple drugs, a combination of asparagine synthase (AS) gene and β-aspartyl hydroxamic acid or albizziinn, and a combination of ornithine decarboxylase (ODC) gene and α-difluoromethyl-ornithine (DEMO).

[0080] As used herein, the term “expression vector” refers to a nucleic acid sequence comprising a structural gene and a promoter for regulating expression thereof, and in addition, various regulatory elements in a state that allows them to operate within host cells. The regulatory element may include, preferably, terminators, selectable markers such as drug-resistance genes (e.g., a kanamycin resistance gene, a hygromycin resistance gene, etc.), and enhancers. It is well known to those skilled in the art that the type of an organism (e.g., a plant) expression vector and the type of a regulatory element may vary depending on the host cell. In the case of plants, a plant expression vector for use in the present invention may further have a T-DNA region. A T-DNA region enhances the efficiency of gene transfer, especially when a plant is transformed using Agrobacterium.

[0081] As used herein, the term “recombinant vector” refers to a vector which can transfer a polynucleotide sequence of interest to a target cell. Examples of such a vector include vectors which are capable of self replication or capable of being incorporated into a chromosome within host cells (e.g., prokaryotic cells, yeast, animal cells, plant cells, insect cells, whole animals, and whole plants), and contain a promoter at a site suitable for transcription of a polynucleotide of the present invention.

[0082] As used herein, the term “terminator” refers to a sequence which is located downstream of a protein-encoding region of a gene and which is involved in the termination of transcription when DNA is transcribed into mRNA, and the addition of a poly A sequence. It is known that a terminator contributes to the stability of mRNA, and has an influence on the amount of gene expression. Examples of a terminator include, but are not limited to, terminators derived from mammals, the CaMV35S terminator, the terminator of the nopaline synthase gene (Tnos), the terminator of the tobacco PR1a gene, and the like.

[0083] As used herein, the term “promoter” refers to a base sequence which determines the initiation site of transcription of a gene and is the region in the ORF of DNA which directly regulates the frequency of transcription. Transcription is started by RNA polymerase binding to a promoter. A promoter region is usually located within about 2 kbp upstream of the first exon of a putative protein coding region. Therefore, it is possible to estimate a promoter region by predicting a protein coding region in a genomic base sequence using DNA analysis software. A putative promoter region is usually located upstream of a structural gene, but depending on the structural gene, i.e., a putative promoter region may be located downstream of a structural gene. Preferably, a putative promoter region is located within about 2 kbp upstream of the translation initiation site of the first exon.

[0084] As used herein, the term “constitutive” for expression of a promoter of the present invention refers to a character of the promoter that the promoter is expressed in a substantially constant amount in all tissues of an organism no matter whether the growth stage of the organism is a juvenile phase or a mature phase. Specifically, when Northern blotting analysis is performed under the same conditions as those described in examples of the present specification, expression is considered to be constitutive according to the definition of the present invention if substantially the same amount of expression is observed at the same or corresponding site at any time (e.g., two or more time points (e.g., day 5 and day 15)), for example. Constitutive promoters are considered to play a role in maintaining the homeostasis of organisms in a normal growth environment. These characters can be determined by extracting RNA from any portion of an organism and analyzing the expression amount of the RNA by Northern blotting or quantitating expressed proteins by Western blotting.

[0085] An “enhancer” may be used so as to enhance the expression efficiency of a gene of interest. When used in animals, an enhancer region containing an upstream sequence within the SV40 promoter is preferable. One or more enhancers may be used, or no enhancer may be used.

[0086] As used herein, the term “operatively linked” indicates that a desired sequence is located such that expression (operation) thereof is under control of a transcription and translation regulatory sequence (e.g., a promoter, an enhancer, and the like) or a translation regulatory sequence. In order for a promoter to be operatively linked to a gene, typically, the promoter is located immediately upstream of the gene. A promoter is not necessarily adjacent to a structural gene.

[0087] As used herein, the terms “transformation”, “transduction” and “transfection” are used interchangeably unless otherwise mentioned, and refers to introduction of a nucleic acid into host cells. As a transformation method, any technique for introducing DNA into host cells can be used, including various well-known techniques, such as, for example, the electroporation method, the particle gun method (gene gun), the calcium phosphate method, and the like.

[0088] As used herein, the term “transformant” refers to the whole or a part of an organism, such as a cell, which is produced by transformation. Examples of a transformant include prokaryotic cells, yeast, animal cells, plant cells, insect cells and the like. Transformants may be referred to as transformed cells, transformed tissue, transformed hosts, or the like, depending on the subject. As used herein, all of the forms are encompassed, however, a particular form may be specified in a particular context.

[0089] Examples of prokaryotic cells include prokaryotic cells of the genera Escherichia, Serratia, Bacillus, Brevibacterium, Corynebacterium, Microbacterium, Pseudomonas, and the like, e.g., Escherichia coli XL1-Blue, Escherichia coli XL2-Blue, Escherichia coli DH1, Escherichia coli MC1000, Escherichia coli KY3276, Escherichia coli W1485, Escherichia coli JM109, Escherichia coli HB101, Escherichia coli No. 49, Escherichia coli W3110, Escherichia coli NY49, Escherichia coli BL21 (DE3), Escherichia coli BL21 (DE3) pLysS, Escherichia coli HMS174 (DE3), Escherichia coli HMS174 (DE3) pLysS, Serratia ficaria, Serratia fonticola, Serratia liquefaciens, Serratia marcescens, Bacillus subtilis, Bacillus amyloliquefaciens, Brevibacterium ammmoniagenes, Brevibacterium immriophilum ATCC14068, Brevibacterium saccharolyticum ATCC14066, Corynebacterium glutamicum ATCC13032, Corynebacterium glutamicum ATCC14067, Corynebacterium glutamicum ATCC13869, Corynebacterium acetoacidophilum ATCC13870, Microbacterium ammoniaphilum ATCC15354, Pseudomonas sp.D-0110, and the like.

[0090] Examples of animal cells include human MRC-5 cells, human EEL cells, human WI-38 cells, mouse myeloma cells, rat myeloma cells, human myeloma cells, mouse hybridoma cells, CHO cells derived from chinese hamster, BHK cells, African green monkey kidney cells, human leukemia cells, HBT5637 (Japanese Laid-Open Publication No. 63-299), human colon cancer cell strains. Mouse myeloma cells include ps20, NSO, and the like. Rat myeloma cells include YB2/0, and the like. Human fetus kidney cells includes HEK293 (ATCC: CRL-1573), and the like. Human leukemia cells include BALL-1, and the like. African green monkey kidney cells include COS-1, COS-7, vero cell and the like. Human colon cancer cell strains include HCT-15, and the like.

[0091] The term “animal” is used herein in its broadest sense and refers to vertebrates and invertebrates (e.g., arthropods). Examples of animals include, but are not limited to, any of the class Mammalia, the class Ayes, the class Reptilia, the class Amphibia, the class Pisces, the class Insecta, the class Vermes, and the like.

[0092] As used herein, the term “tissue” in relation to organisms refers to an aggregate of cells having substantially the same function. Therefore, a tissue may be a part of an organ. Organs usually have cells having the same function, and may have coexisting cells having slightly different functions. Therefore, as used herein, tissues may have various kinds of cells as long as a certain property is shared by the cells.

[0093] As used herein, the term “organ” refers to a structure which has a single independent form and in which one or more tissues are associated together to perform a specific function. In plants, examples of organs include, but are not limited to, callus, root, stem, trunk, leaf, flower, seed, embryo bud, embryo, fruit, and the like. In animals, examples of organs include, but are not limited to, stomach, liver, intestine, pancreas, lung, airway, nose, heart, artery, vein, lymph node (lymphatic system), thymus, ovary, eye, ear, tongue, skin, and the like.

[0094] As used herein, the term “transgenic” refers to incorporation of a specific gene into an organism (e.g., plants or animals (mice, etc.)) or such an organism having an incorporated gene.

[0095] When organisms of the present invention are animals, the transgenic organisms can be produced by a microinjection method (a trace amount injection method), a viral vector method, an embryonic stem (ES) cell method, a sperm vector method, a chromosome fragment introducing method (transsomic method), an episome method, or the like. These transgenic animal producing techniques are well known in the art.

[0096] As used herein, the term “screening” refers to selection of a substance, a host cell, a virus, or the like having a given specific property of interest from a number of candidates using a specific operation/evaluation method. It will be understood that the present invention encompasses viruses having desired activity obtained by screening.

[0097] As used herein, the terms “chip” or “microchip” are used interchangeably to refer to a micro integrated circuit which has versatile functions and constitutes a portion of a system. Examples of a chip include, but are not limited to, DNA chips, protein chips, and the like.

[0098] As used herein, the term “array” refers to a substrate (e.g., a chip, etc.) which has a pattern of a composition containing at least one (e.g., 1000 or more, etc.) target substances (e.g., DNA, proteins, cells, etc.), which are arrayed. Among arrays, patterned substrates having a small size (e.g., 10×10 mm, etc.) are particularly referred to as microarrays. The terms “microarray” and “array” are used interchangeably. Therefore, a patterned substrate having a larger size than that which is described above may be referred to as a microarray. For example, an array comprises a set of desired transfection mixtures fixed to a solid phase surface or a film thereof. An array preferably comprises at least 10² antibodies of the same or different types, more preferably at least 10³, even more preferably at least 10⁴, and still even more preferably at least 10⁵. These antibodies are placed on a surface of up to 125×80 mm, more preferably 10×10 mm. An array includes, but is not limited to, a 96-well microtiter plate, a 384-well microtiter plate, a microtiter plate the size of a glass slide, and the like. A composition to be fixed may contain one or a plurality of types of target substances. Such a number of target substance types may be in the range of from one to the number of spots, including, without limitation, about 10, about 100, about 500, and about 1,000.

[0099] As described above, any number of target substances (e.g., biomolecular, such as cells) may be provided on a solid phase surface or film, typically including no more than 10⁶ biological molecules per substrate, in another embodiment no more than 10⁷ biological molecules, no more than 10⁶ biological molecules, no more than 10⁵ biological molecules, no more than 10⁴ biological molecules, no more than 10³ biological molecules, or no more than 10² biological molecules. A composition containing more than 10⁸ biological molecule target substances may be provided on a substrate. In these cases, the size of a substrate is preferably small. Particularly, the size of a spot of a composition containing target substances (e.g., such as cells) may be as small as the size of a single biological molecule (e.g., 1 to 2 nm order). In some cases, the minimum area of a substrate may be determined based on the number of biological molecules on a substrate.

[0100] “Spots” of biological molecules may be provided on an array. As used herein, the term “spot” refers to a certain set of compositions containing target substances. As used herein, the term “spotting” refers to an act of preparing a spot of a composition containing a certain target substance on a substrate or plate. Spotting may be performed by any method, for example, pipetting or the like, or alternatively, using an automatic device. These methods are well known in the art.

[0101] As used herein, the term “address” refers to a unique position on a substrate, which may be distinguished from other unique positions. Addresses are appropriately associated with spots. Addresses can have any distinguishable shape such that substances at each address may be distinguished from substances at other addresses (e.g., optically). A shape defining an address may be, for example, without limitation, a circle, an ellipse, a square, a rectangle, or an irregular shape. Therefore, the term “address” is used to indicate an abstract concept, while the term “spot” is used to indicate a specific concept. Unless it is necessary to distinguish them from each other, the terms “address” and “spot” may be herein used interchangeably.

[0102] The size of each address particularly depends on the size of the substrate, the number of addresses on the substrate, the amount of a composition containing target substances and/or available reagents, the size of microparticles, and the level of resolution required for any method used for the array. The size of each address may be, for example, in the range of from 1-2 nm to several centimeters, though the address may have any size suited to an array.

[0103] The spatial arrangement and shape which define an address are designed so that the microarray is suited to a particular application. Addresses may be densely arranged or sparsely distributed, or subgrouped into a desired pattern appropriate for a particular type of material to be analyzed.

[0104] As used herein, the term “support” refers to a material which can carry cells, bacteria, viruses, polynucleotides, or polypeptides. Such a support may be made from any solid material which has a capability of binding to a biological molecule as used herein via covalent or noncovalent bond, or which may be induced to have such a capability.

[0105] Examples of materials used for supports include any material capable of forming a solid surface, such as, without limitation, glass, silica, silicon, ceramics, silicon dioxide, plastics, metals (including alloys), naturally-occurring and synthetic polymers (e.g., polystyrene, cellulose, chitosan, dextran, and nylon), and the like. Preferably, a support comprises a portion for producing hydrophobic bonds. A support may be formed of layers made of a plurality of materials. For example, a support may be made of an inorganic insulating material, such as glass, quartz glass, alumina, sapphire, forsterite, silicon carbide, silicon oxide, silicon nitride, or the like. A support may be made of an organic material, such as polyethylene, ethylene, polypropylene, polyisobutylene, polyethylene terephthalate, unsaturated polyester, fluorine-containing resin, polyvinyl chloride, polyvinylidene chloride, polyvinyl acetate, polyvinyl alcohol, polyvinyl acetal, acrylic resin, polyacrylonitrile, polystyrene, acetal resin, polycarbonate, polyamide, phenol resin, urea resin, epoxy resin, melamine resin, styrene-acrylonitrile copolymer, acrylonitrile-butadiene-styrene copolymer, silicone resin, polyphenylene oxide, polysulfone, and the like. Alternatively, nitrocellulose film, nylon film, PVDF film, or the like, which are used in blotting, may be used as a material for a support.

[0106] The varicella-zoster virus of the present invention can be used as an ingredient of a pharmaceutical composition for the treatment, prevention, and/or therapy of infectious diseases.

[0107] As used herein, the term “effective amount” in relation to a drug refers to an amount which causes the drug to exhibit intended efficacy. As used herein, an effective amount corresponding to a smallest concentration may be referred to as a minimum effective amount. Such a minimum effective amount is well known in the art. Typically, the minimum effective amount of a drug has been determined or can be determined as appropriate by those skilled in the art. The determination of such an effective amount can be achieved by actual administration, use of an animal model, or the like. The present invention is also useful for the determination of such an effective amount.

[0108] As used herein, the term “pharmaceutically acceptable carrier” refers to a material which is used for production of a pharmaceutical agent or an agricultural chemical (e.g., an animal drug), and has no adverse effect on effective ingredients. Examples of such a pharmaceutically acceptable carrier include, but are not limited to: antioxidants, preservatives, colorants, flavoring agents, diluents, emulsifiers, suspending agents, solvents, fillers, bulking agents, buffers, delivery vehicles, excipients, and/or agricultural or pharmaceutical adjuvants.

[0109] The type and amount of a pharmaceutical agent used in the treatment method of the present invention can be easily determined by those skilled in the art based on information obtained by the method of the present invention (e.g., information relating to a disease) in view of the purpose of use, the target disease (type, severity, etc.), the subject's age, size, sex, and case history, the morphology and type of a site of a subject of administration, or the like. The frequency of subjecting a subject (patient) to the monitoring method of the present invention is also easily determined by those skilled in the art with respect to the purpose of use, the target disease (type, severity, etc.), the subject's age, size, sex, and case history, the progression of the therapy, and the like. Examples of the frequency of monitoring the state of a disease include once per day to once per several months (e.g., once per week to once per month). Preferably, monitoring is performed once per week to once per month with reference to the progression.

[0110] As used herein, the term “instructions” refers to a description of the method of the present invention for a person who performs administration, such as a medical doctor, a patient, or the like. Instructions state when to administer a medicament of the present invention, such as immediately after or before radiation therapy (e.g., within 24 hours, etc.). The instructions are prepared in accordance with a format defined by an authority of a country in which the present invention is practiced (e.g., Health, Labor and Welfare Ministry in Japan, Food and Drug Administration (FDA) in the U.S., and the like), explicitly describing that the instructions are approved by the authority. The instructions are so-called package insert and are typically provided in paper media. The instructions are not so limited and may be provided in the form of electronic media (e.g., web sites, electronic mails, and the like provided on the Internet).

[0111] In a therapy of the present invention, two or more pharmaceutical agents may be used as required. When two or more pharmaceutical agents are used, these agents may have similar properties or may be derived from similar origins, or alternatively, may have different properties or may be derived from different origins. A method of the present invention can be used to obtain information about the drug resistance level of a method of administering two or more pharmaceutical agents.

[0112] In the present invention, it will be appreciated by those skilled in the art that once the analysis result of a certain sugar chain structure has been correlated with a level of a disease concerning a similar type of organism, culture cell, tissue, animal (e.g., a mouse for a human) or the like, a corresponding sugar chain structure can be correlated with the disease level. Such matters are described and supported in, for example, “Doubutsu Baiyosaibo Manual (Animal Culture Cell Manual), Seno at al. eds., Kyoritsu shuppan, 1993, the entirety of which is hereby incorporated by reference.

[0113] (General Techniques Used Herein)

[0114] Techniques used herein are within the technical scope of the present invention unless otherwise specified. These techniques are commonly used in the fields of sugar chain science, fluidics, micromachining, organic chemistry, biochemistry, genetic engineering, molecular biology, microbiology, genetics, and their relevant fields. The techniques are well described in documents described below and the documents mentioned herein elsewhere.

[0115] Micromachining is described in, for example, Campbell, S. A. (1996), The Science and Engineering of Microelectronic Fabrication, Oxford University Press; Zaut, P. V. (1996), Micromicroarray Fabrication: a Practical Guide to Semiconductor Processing, Semiconductor Services; Madou, M. J. (1997), Fundamentals of Microfabrication, CRC1 5 Press; Rai-Choudhury, P. (1997), Handbook of Microlithography, Micromachining & Microfabrication: Microlithography; and the like, the relevant portions of which are hereby incorporated by reference.

[0116] Molecular biology techniques, biochemistry techniques, and microbiology techniques used herein are well known and commonly used in the art, and are described in, for example, Maniatis, T. et al. (1989), Molecular Cloning: A Laboratory Manual, Cold Spring Harbor and its 3rd Ed. (2001); Ausubel, F. M. at al. eds, Current Protocols in Molecular Biology, John Wiley & Sons Inc., NY, 10158 (2000); Innis, M. A. (1990), PCR Protocols: A Guide to Methods and Applications, Academic Press; Innis, M. A. et al. (1995), PCR Strategies, Academic Press; Sninsky, J. J. et al. (1999), PCR Applications: Protocols for Functional Genomics, Academic Press; Gait, M. J. (1985), Oligonucleotide Synthesis: A Practical Approach, IRL Press; Gait, M. J. (1990), Oligonucleotide Synthesis: A Practical Approach, IRL Press; Eckstein, F. (1991), Oligonucleotides and Analogues: A Practical Approach, IRL Press; Adams, R. L. et al. (1992), The Biochemistry of the Nucleic Acids, Chapman & Hall; Shabarova, Z. et al. (1994), Advanced Organic Chemistry of Nucleic Acids, Weinheim; Blackburn, G. M. et al. (1996), Nucleic Acids in Chemistry and Biology, Oxford University Press; Hermanson, G. T. (1996), Bioconjugate Techniques, Academic Press; Method in Enzymology 230, 242, 247, Academic Press, 1994; Special issue, Jikken Igaku (Experimental Medicine) “Idenshi Donyu & Hatsugenkaiseki Jikkenho (Experimental Method for Gene introduction & Expression Analysis)”, Yodo-sha, 1997; and the like. Relevant portions (or possibly the entirety) of each of these publications are herein incorporated by reference.

### DESCRIPTION OF PREFERRED EMBODIMENTS

[0117] Hereinafter, the present invention will be described by way of embodiments. Embodiments described below are provided only for illustrative purposes. Accordingly, the scope of the present invention is not limited by the embodiments except as by the appended claims. It will be clearly appreciated by those skilled in the art that variations and modifications can be made without departing from the scope of the present invention with reference to the specification.

[0118] According to an aspect of the present invention, recombinant varicella-zoster virus is provided. Preferably, the varicella-zoster virus contains a BAC vector sequence in its genome sequence. By constructing a varicella-zoster virus genome containing a BAC vector sequence, it becomes possible to handle the varicella-zoster virus genome as the BAC molecule in bacteria. A BAC vector sequence used herein preferably contains an origin of replication derived from F plasmid, or alternatively may contain any origin of replication other than an origin of replication derived from F plasmid, as long as it has a sequence of 300 kb or more and can be held and grown as a bacterial artificial sequence in bacterial cells. The BAC vector of the present invention can be maintained and/or grow in bacterial host cells, preferably E. coli cells. Preferably, a portion of the BAC vector is inserted into a non-essential region of a varicella-zoster virus genome, so that it is possible to manipulate it as a BAC containing the varicella-zoster virus genome. When the BAC containing the varicella-zoster virus genome is introduced into a mammalian cell, the recombinant varicella-zoster virus can be produced and grown. As a host cell for the recombinant varicella-zoster virus, any mammalian cell which can grow a wild-type varicella-zoster virus strain can be used. Preferably, such a host cell is derived from a human, including, for example, but being not limited to, human MRC-5 cell, human HEL cell, and human WI-38.

[0119] (Multivalent Vaccine)

[0120] The BAC of the present invention can include genes encoding any antigenic proteins other than proteins encoded in the varicella-zoster virus genome. Although the antigenic proteins are not limited, proteins of virus other than varicella-zoster virus are preferable, and, as a result, multivalent vaccines are provided in accordance with the present invention. Viruses from which the antigenic proteins are derived, other than the varicella-zoster virus, may include, but are not limited to, for example, viruses selected from the group consisting of mumps virus, measles virus, rubella virus, West Nile virus, influenza virus, SAPS coronavirus, and Japanese encephalitis virus. In one aspect, the viruses other than the varicella-zoster virus may include, but are not limited to, viruses selected from the group consisting of mumps virus, measles virus, and rubella virus. In one aspect, the single BAC vector containing the varicella-zoster virus genome includes the gene of mumps virus, the gene of measles virus, and the gene of rubella virus. Preferably, the gene of mumps virus is selected from the group consisting of HN gene, F gene, and N gene. Preferably, the gene of measles virus is selected from the group consisting of H gene, F gene, and N gene. Preferably, the gene of rubella virus is selected from the group consisting of C gene, E1 gene, and E2 gene. It is preferable that the gene of influenza virus is HA gene. It is preferable that the gene of SAPS coronavirus is S (spike) gene. Preferably, the gene of West Nile virus is selected from the group consisting of Pr gene and E gene. Preferably, the gene of Japanese encephalitis virus is selected from the group consisting of Pr gene and E gene. These genes of the virus are known, and thus those skilled in the art can isolate these genes of virus by employing well-known techniques such as a PCR method and a hybridization method.

[0121] (Method for Producing a BAC Vector Containing a Varicella-Zoster Virus Genome)

[0122] Various techniques can be used to produce a BAC vector containing a human varicella-zoster virus by using a human varicella-zoster virus genome and a BAC vector.

[0123] An example of the technique using homologous recombination is a technique using a nucleic acid having a linear BAC vector sequence linked with a sequence homologous to a human varicella-zoster virus genome.

[0124] A method for producing a BAC vector comprising a human varicella-zoster virus genome by using a nucleic acid having a linear BAC vector sequence linked with a sequence homologous to a human varicella-zoster virus genome representatively comprises the steps of: (1) introducing the nucleic acid along with the human varicella-zoster virus genome into appropriate hosts (for example, into human established cell); (2) culturing the host cells to elicit homologous recombination between the homologous sequence linked with the linear BAC vector sequence and the human varicella-zoster virus genome sequence; (3) screening the host cells for one which contains the human varicella-zoster virus genome sequence having the BAC vector sequence incorporated due to the homologous recombination; (4) culturing the host cell and extracting a circular virus DNA.

[0125] Alternatively, in order to produce a BAC containing a human varicella-zoster virus genome using a human varicella-zoster virus genome and a BAC sequence, various methods, such as use of nucleic acid fragments obtained using restriction enzymes or the like, can be employed instead of homologous recombination.

[0126] A non-essential region of the varicella-zoster virus genome for introducing a BAC vector sequence therein selected from the group consisting of: the region in the ORF of gene 13, the region in the ORF of gene 56, the region in the ORF of gene 57, the region in the ORF of gene 58, the region flanking the ORF of gene 11, the region flanking the ORF of gene 12, the region flanking the ORF of gene 13, the region flanking the ORF of gene 56, the region flanking the ORF of gene 57, the region flanking the ORF of gene 58, and the contiguous region of the gene 56, gene 57, and gene 58 ORF.

[0127] Preferably non-essential regions are the region in the ORF of gene 13, the region in the ORF of gene 56, the region in the ORF of gene 57, the region in the ORF of gene 58, the region flanking the ORF of gene 13, the region flanking the ORF of gene 56, the region flanking the ORF of gene 57, the region flanking the ORF of gene 58, and the contiguous region of the gene 56, gene 57, and gene 58 ORF. This is because the regions of gene 13, gene 56, gene 58, and the contiguous regions of the gene 56, gene 57, and gene 58 ORF are revealed not to affect proliferation of the virus even when deleted from the varicella-zoster virus genome. Alternatively, apart of a BAC vector sequence may be inserted to the region in the ORF of gene 62 of the varicella-zoster virus genome.

[0128] A BAC vector sequence used in the present invention preferably includes a recombinant protein-dependent recombinant sequence and/or a selectable marker. Preferably, the selectable marker sequence is a drug selectable marker and/or a gene encoding a green fluorescent protein. This is because the presence of a desired gene can be easily confirmed.

[0129] Varicella-zoster virus employed as a starting material in the present invention may be from wild strain or mutated strain. Preferably, an attenuated virus, for example, varicella-zoster virus having mutation in Oka vaccine strain or the gene 62 is used as varicella-zoster virus as a starting material. As an “attenuated varicella-zoster virus”, a virus which comprises at least one of mutation of the gene 62, or more than one combination of mutation selected from the following group:

(a) base substitution at position 2110 for G;
(b) base substitution at position 3100 for C;
(c) base substitution at position 3818 for C;
(d) base substitution at position 4006 for G;
(e) base substitution at position 1251 for C;
(f) base substitution at position 2226 for C;
(g) base substitution at position 3657 for C;
(h) base substitution at position 162 for C;
(i) base substitution at position 225 for C;
(j) base substitution at position 523 for C;
(k) base substitution at position 1565 for C;
(l) base substitution at position 1763 for C;
(m) base substitution at position 2652 for C;
(n) base substitution at position 4052 for C; and
(o) base substitution at position 4193 for C,
is included.

[0130] According to another aspect of the present invention, a vector used for production of the above-described virus and a method for producing the above-described virus are provided. According to still another aspect of the present invention, a pharmaceutical composition comprising the above-described virus and a pharmaceutical composition in the form of a vaccine are provided.

[0131] The recombinant human varicella-zoster virus of the present invention can be used as a vaccine, since it has many proteins which have the same structure as that of wild virus.

[0132] According to still another aspect of the present invention, a method for introducing mutation into a vector for producing a vaccine of the present invention is provided. The method comprises the steps of: introducing a vector into a bacterial host cell; introducing a plasmid vector containing a fragment consisting of a portion of a human varicella-zoster virus genome into the bacterial host cell, wherein the fragment has at least one mutation; culturing the bacterial host cell; and isolating a vector having a BAC vector sequence from the cultured bacterial host cell. In the above-described method, homologous recombination occurs between the vector for producing a vaccine of the present invention and the plasmid vector containing the fragment consisting of the portion of the human varicella-zoster virus genome, in bacterial host cells. As a result, the vector for producing the vaccine of the present invention has a mutation in the fragment consisting of the portion of the human varicella-zoster virus genome.

[0133] In the above-described method, the step of introducing the vector into bacterial host cells can be achieved by using various well-known methods, such as electroporation and the like. Similarly, the plasmid vector containing the fragment consisting of the portion of the human varicella-zoster virus genome can be introduced into bacterial host cells. As a technique for introducing a mutation into the fragment, a technique for introducing a mutation by using PCR is well known. For example, by using heat-resistant polymerase having no proofreading function, where one of the four nucleotides is in lower quantity, it is possible to introduce a mutation randomly. Alternatively, by PCR using a primer having a mutated base sequence, it is possible to introduce a desired mutation into a desired site. When the bacterial cell is cultured, homologous recombination occurs between the vector for producing the vaccine of the present invention and the plasmid vector containing the fragment consisting of the portion of the human varicella-zoster virus genome. As a result, the vector for producing the vaccine of the present invention has a mutation in the fragment consisting of the portion of the human varicella-zoster virus genome. In order to prepare a BAC vector sequence from a bacterial host cell, various well-known techniques (e.g., the alkaline method, etc.) and commercially available kits can be used.

[0134] According to another aspect of the present invention, another method for introducing a mutation into a vector for producing the vaccine of the present invention is provided. The method comprises the steps of: introducing the vector into a bacterial host cell; introducing a first plasmid vector containing a first fragment consisting of a portion of a human varicella-zoster virus genome into the bacterial host cell, wherein the first fragment has at least one mutation; introducing a second plasmid vector containing a second fragment consisting of a portion of the human varicella-zoster virus genome into the bacterial host cell, wherein the second fragment has at least one mutation and the second fragment is different from the first fragment; culturing the bacterial host cell; and isolating a vector having a BAC vector sequence from the cultured bacterial host cell.

[0135] According to an aspect of the present invention, a nucleic acid cassette which may be used for producing the vaccine of the present invention, is provided. The nucleic acid cassette preferably comprises a first fragment capable of homologous recombination with a human varicella-zoster virus genome in a host cell, a BAC vector sequence, and a second fragment capable of homologous recombination with a human varicella-zoster virus genome in the host cell, wherein the opposite ends of the BAC sequence are linked with the first fragment and second fragments, respectively. In this case, the first fragment and the second fragment are preferably at least 1 kb, at least 1.5 kb, or at least 2 kb in length. The first fragment and the second fragment preferably are at least 80% identity, at least 85% identity, at least 90% identity, or at least 95% identity to the human varicella-zoster virus genome sequence.

[0136] Preferably, the first and second fragments are independently derived from regions selected from the group consisting of the following regions of the varicella-zoster virus genome, or independently have at least 80%, 85%, 90%, or 95% identity to regions selected from the group consisting of the following regions of the varicella-zoster virus genome: the region in the ORF of gene 13, the region in the ORF of gene 56, the region in the ORF of gene 57, the region in the ORF of gene 58, the region flanking the ORF of gene 11, the region flanking the ORF of gene 12, the region flanking the ORF of gene 13, the region flanking the ORF of gene 56, the region flanking the ORF of gene 57, and the region flanking the ORF of gene 58.

[0137] Preferably, the first and second fragments are derived from different regions of the human varicella-zoster virus genome. The first and second fragments may be independently derived from the region in the ORF of gene 13, the region in the ORF of gene 56, the region in the ORF of gene 57, the region in the ORF of gene 58, the region flanking the ORF of gene 11, the region flanking the ORF of gene 12, the region flanking the ORF of gene 13, the region flanking the ORF of gene 56, the region flanking the ORF of gene 57, and the region flanking the ORF of gene 58. Preferably, the BAC vector sequence comprises a recombinant protein-dependent recombinant sequence and/or a selectable marker in order to control homologous recombination and easily detect a desired gene. The selectable marker may be either a drug selectable marker or a gene encoding a fluorescent protein (e.g., a green fluorescent protein, etc.). Representatively, the BAC vector sequence has a nucleic acid sequence set forth in SEQ ID NO.: 3.

[0138] (Preparation of Recombinant Varicella-Zoster Virus Containing a Mutated Gene)

[0139] A method of the present invention can be used to easily prepare a varicella-zoster virus having a varicella-zoster virus genome into which a mutated gene is introduced.

[0140] Such mutation introduction can be performed by using a method described below.

[0141] Into E. coli, (a) VZV-BAC-DNA plasmid and (b) a shuttle vector or a PCR product having a partial sequence of a varicella-zoster virus genome with any mutation as a mutated nucleic acid, are introduced. Homologous recombination is allowed to occur between VZV-BAC-DNA plasmid and the shuttle vector or PCR product, so that a foreign gene mutation can be introduced into VZV-BAC-DNA plasmid. Alternatively, a transposon can be used to randomly introduce a mutation. The VZV-BAC-DNA plasmid, into which the mutation has been introduced, can be easily selected and grown in E. coli. By causing VZV-BAC-DNA having the mutation to produce a virus, the recombinant varicella-zoster virus can be obtained (Markus Wagner, TRENDS in Microbilogy, Vol. 10, No. 7, July 2002). Specific examples will be described below.

[0142] (1) Use of a Temperature Sensitive Shuttle Vector Containing a Mutated Varicella-Zoster Virus as a Mutated Nucleic Acid:

[0143] Firstly, the shuttle vector and VZV-BAC-DNA plasmid are allowed to recombine via a first homologous region to generate a cointegrate in which the shuttle vector is linked with VZV-BAC-DNA plasmid. Next, since the replication origin of the shuttle vector is temperature-sensitive, the shuttle plasmid is removed. In a second recombination event, the cointegrated portion is removed. When the second recombination event occurs via the first homologous region, a plasmid having the same sequence as that of VZV-BAC-DNA used for the recombination is generated. In contrast, when the second recombination event occurs via a second homologous region different from the first homologous region, a modified VZV-BAC-DNA plasmid having the foreign gene contained in the shuttle vector is obtained. When the first homologous region and the second homologous region have substantially the same length, the probability that the second recombination event occurs in the second homologous region is substantially the same as the probability that the second recombination event occurs in the first homologous region. Therefore, about half of the resultant VZV-BAC-DNA plasmids are plasmids having the same sequence as that which has been used in the recombination, while about half thereof are plasmids having the foreign gene which has been introduced into the shuttle vector.

[0144] (2) Use of a Linear DNA Fragment:

[0145] In this method, for example, by utilizing the recombination function of recET derived from prophage Rac or the recombination function of redαβ derived from bacteriophage λ, a linear DNA fragment is used to introduce a mutation into a circular VZV-BAC-DNA molecule. Specifically, a selectable marker flanking a target sequence and a linear DNA fragment containing a homologous sequence are introduced along with VZV-BAC-DNA into E. coli capable of homologous recombination. In order to avoid the degradation of the linear DNA within E. coli, it is preferable to use E. coli lacking exonuclease or cause expression of redγ (gam) which is an exonuclease inhibitor derived from a bacteriophage. The linear DNA has a region homologous to VZV-BAC-DNA plasmid on the opposite ends thereof. Homologous recombination occurs via the homologous region, thereby making it possible to introduce a desired sequence of the linear DNA fragment into VZV-BAC-DNA. RecET and redαβ exhibit homologous recombination via a homologous sequence having a length of about 25 to 50 nucleotides. Therefore, the recombination functions of recET and redαβ can be used more easily than recA-mediated homologous recombination.

[0146] (3) Use of a Transposon:

[0147] The function of a transposon element to insert into a nucleic acid in E. coli is used. For example, a transposon element containing a desired foreign gene and VZV-BAC-DNA are introduced into E. coli so that the transposon element is randomly inserted into VZV-BAC-DNA. Thereby, VZV-BAC-DNA having the inserted foreign gene is obtained.

[0148] Further, for example, it is also possible to introduce a random mutation in recombinant varicella-zoster virus genome by treating a host cell having recombinant varicella-zoster virus such as VZV-BAC-DNA employing a mutagenic agent (for example, nitrosoguanidine).

[0149] (Formulation)

[0150] The present invention also provides methods of treatment and/or prevention of diseases or disorders (e.g., infectious diseases) by administration to a subject of an effective amount of a therapeutic/prophylactic agent. By the therapeutic/prophylactic agent is meant a composition of the present invention in combination with a pharmaceutically acceptable carrier type (e.g., a sterile carrier).

[0151] The therapeutic/prophylactic agent will be formulated and dosed in a fashion consistent with good medical practice, taking into account the clinical condition of the individual patient (especially the side effects of treatment with the therapeutic/prophylactic agent alone), the site of delivery, the method of administration, the scheduling of administration, and other factors known to those skilled in the art. The “effective amount” for purposes herein is thus determined by such considerations.

[0152] As a general proposition, the total pharmaceutically effective amount of the therapeutic/prophylactic agent administered parenterally per dose will be in the range of about 1 μg/kg/kg/day to 10 mg/kg/day of patient body weight, although, as noted above, this will be subject to therapeutic discretion. More preferably, this dose is at least 0.01 mg/kg/day, and most preferably for humans between about 0.01 and 1 mg/kg/day for the cellular physiologically active material of the present invention. If given continuously, the therapeutic/prophylactic agent is typically administered at a dose rate of about 1 μg/kg/hour to about 50 μg/kg/hour, either by 1-4 injections per day or by continuous subcutaneous infusions, for example, using a mini-pump. An intravenous bag solution may also be employed. The length of treatment needed to observe changes and the interval following treatment for responses to occur appears to vary depending on the desired effect.

[0153] The therapeutic/prophylactic agents can be administered orally, rectally, parenterally, intracistemally, intravaginally, intraperitoneally, topically (as by powders, ointments, gels, drops or transdermal patch), or as an oral or nasal spray. “Pharmaceutically acceptable carrier” refers to a non-toxic solid, semisolid or liquid filler, diluent, encapsulating material or formulation auxiliary of any type. The term “parenteral” as used herein refers to modes of administration which include intravenous, intramuscular, intraperitoneal, intrasternal, subcutaneous and intraarticular injection and infusion.

[0154] The therapeutic/prophylactic agents of the invention are also suitably administered by sustained-release systems. Suitable examples of sustained-release therapeutic/prophylactic agents are administered orally, rectally, parenterally, intracistemally, intravaginally, intraperitoneally, topically (as by powders, ointments, gels, drops or transdermal patch), or as an oral or nasal spray. “Pharmaceutically acceptable carrier” refers to a non-toxic solid, semisolid or liquid filler, diluent, encapsulating material or formulation auxiliary of any type. The term “parenteral” as used herein refers to modes of administration which include intravenous, intramuscular, intraperitoneal, intrasternal, subcutaneous and intraarticular injection and infusion.

[0155] For parenteral administration, in one embodiment, the therapeutic/prophylactic agent is formulated generally by mixing it at the desired degree of purity, in a unit dosage injectable form (solution, suspension, or emulsion), with a pharmaceutically acceptable carrier, i.e., one that is non-toxic to recipients at the dosages and concentrations employed and is compatible with other ingredients of the formulation. For example, the formulation preferably does not include oxidizing agents and other compounds that are known to be deleterious to the therapeutic/prophylactic agent.

[0156] Generally, the formulations are prepared by contacting the therapeutic/prophylactic agent uniformly and intimately with liquid carriers or finely divided solid carriers or both. Then, if necessary, the product is shaped into the desired formulation. Preferably the carrier is a parenteral carrier, more preferably a solution that is isotonic with the blood of the recipient. Examples of such carrier vehicles include water, saline, Ringer's solution, and dextrose solution. Non-aqueous vehicles such as fixed oils and ethyl oleate are also useful herein, as well as liposomes.

[0157] The carrier suitably contains minor amounts of additives such as substances that enhance isotonicity and chemical stability. Such materials are non-toxic to recipients at the dosages and concentrations employed, and include buffers such as phosphate, citrate, succinate, acetic acid, and other organic acids or their salts; antioxidants such as ascorbic acid; low molecular weight (less than about ten residues) polypeptides, e.g., polyarginine or tripeptides; proteins, such as serum albumin, gelatin, or immunoglobulins; hydrophilic polymers such as polyvinylpyrrolidone; amino acids, such as glycine, glutamic acid, aspartic acid, or arginine; monosaccharides, disaccharides, and other carbohydrates including cellulose or its derivatives, glucose, manose, or dextrins; chelating agents such as EDTA; sugar alcohols such as mannitol or sorbitol; counterions such as sodium; and/or nonionic surfactants such as polysorbates, poloxamers, or PEG.

[0158] Any pharmaceutical used for therapeutic administration can be free from organisms and viruses other than a virus as an effective ingredient, i.e., sterile. Sterility is readily accomplished by filtration through sterile filtration membranes (e.g., 0.2 micron membranes). Therapeutic/prophylactic agents generally are placed into a container having a sterile access port, for example, an intravenous solution bag or vial having a stopper pierceable by a hypodermic injection needle.

[0159] Therapeutic/prophylactic agents ordinarily will be stored in unit or multi-dose containers, for example, sealed ampoules or vials, as an aqueous solution or as a lyophilized formulation for reconstitution. As an example of a lyophilized formulation, 10-ml vials are filled with 5 ml of sterile-filtered 1% (w/v) aqueous therapeutic/prophylactic agent solution, and the resulting mixture is lyophilized. The infusion solution is prepared by reconstituting the lyophilized therapeutic/prophylactic agent using bacteriostatic Water-for-injection.

[0160] The invention also provides a pharmaceutical pack or kit comprising one or more containers filled with one or more of the ingredients of the therapeutic/prophylactic agents of the invention. Associated with such container (s) can be a notice in the form prescribed by a governmental agency regulating the manufacture, use or sale of pharmaceuticals or biological products, which notice reflects approval by the agency of manufacture, use or sale for human administration. In addition, the therapeutic/prophylactic agents may be employed in conjunction with other therapeutic compounds.

[0161] The therapeutic/prophylactic agents of the invention may be administered alone or in combination with other therapeutic agents. Therapeutic/prophylactic agents that may be administered in combination with the therapeutic/prophylactic agents of the invention, include but not limited to, chemotherapeutic agents, antibiotics, steroidal and nonsteroidal anti-inflammatories, conventional immunotherapeutic agents, cytokines and/or growth factors. Combinations may be administered either concomitantly, e.g., as an admixture, separately but simultaneously or concurrently; or sequentially. This includes presentations in which the combined agents are administered together as a therapeutic mixture, and also procedures in which the combined agents are administered separately but simultaneously, e.g., as through separate intravenous lines into the same individual. Administration “in combination” further includes the separate administration of one of the compounds or agents given first, followed by the second.

[0162] In certain embodiments, the therapeutic/prophylactic agents of the invention are administered in combination with antiretroviral agents, nucleoside reverse transcriptase inhibitors, nonnucleoside reverse transcriptase inhibitors, and/or protease inhibitors.

[0163] In a further embodiment, the therapeutic/prophylactic agents of the invention are administered in combination with an antibiotic agent. Antibiotic agents that may be used include, but are not limited to, aminoglycoside antibiotics, polyene antibiotics, penicillin antibiotics, cephem antiboitics, peptide antibiotics, microride antibiotics, and tetracycline antibiotics.

[0164] In an additional embodiment, the therapeutic/prophylactic agents of the invention are administered alone or in combination with an anti-inflammatory agent. Anti-inflammatory agents that may be administered with the therapeutic/prophylactic agents of the invention include, but are not limited to, glucocorticoids and the nonsteroidal anti-inflammatories, aminoarylcarboxylic acid derivatives, arylacetic acid derivatives, arylbutyric acid derivatives, arylcarboxylic acids, arylpropionic acid derivatives, pyrazoles, pyrazolones, salicylic acid derivatives, thiazinecarboxamides, e-acetamidocaproic acid, S-adenosylmethionine, 3-amino-4-hydroxybutyric acid, amixetrine, bendazac, benzydamine, bucolome, difenpiramide, ditazol, emorfazone, guaiazulene, nabumetone, nimesulide, orgotein, oxaceprol, paranyline, perisoxal, pifoxime, proquazone, proxazole, and tenidap.

[0165] In a further embodiment, the therapeutic/prophylactic agent of the present invention is administered in combination with other therapeutic/prophylactic regimens (e.g., radiation therapy).

[0166] Hereinafter, the present invention will be described by way of examples. However, the present invention is not limited to these examples.

### Example 1

### Selection of a Region (Gene) into which a BAC Vector is Inserted

[0167] When a recombinant virus in which a foreign antigen gene is inserted is produced utilizing a BAC vector, the size of the resulting genome becomes relatively large due to the insertion of a number of foreign genes. It is known that when the genome size is too large, the genome DNA cannot be packaged in a capsid, resulting in a failure to produce a recombinant virus. It is believed that to insert a number of antigen genes into the Oka vaccine strain, it is necessary to knockout a non-essential gene (of the Oka vaccine strain) to reduce the genome size. A non-essential gene in a virus which can proliferate even after the gene is knocked out is suitable as an insertion site for a foreign sequence such as a BAC vector sequence or a gene encoding an antigenic protein derived from another virus.

[0168] Thus, using recombinant DNA (P-Oka strain VZV-BAC-DNA) in which a varicella virus Oka original strain genome is inserted into a BAC vector, it was evaluated whether the ORF of gene 7 (HSV UL 51 homolog), ORF of gene 13 (thymidylate synthetase), ORF of gene 21 (nucleocapsid protein), ORF of gene 48 (protein kinase), ORF of gene 46 (HSV UL 16 homolog), ORF of gene 56 (HSV UL 4 homolog), ORF of gene 58 (HSV-1 UL 3 homolog), or ORF of gene 66 (protein kinase) gene was a non-essential gene.

### (Procedure)

[0169] The sequence of a gene to be targeted for knockout was linked to both ends of a kanamycin gene in the same orientation as the genome of the target gene to prepare a knockout vector. This knockout vector was introduced into Escherichia coli having the P-Oka strain VZV-BAC-DNA, and homologous recombination was carried out between the knockout vector and the P-Oka strain VZV-BAC-DNA to knock out the target gene.

### (Results)

[0170] A P-Oka strain VZV-BAC-DNA in which the ORF of gene 13, the CRC of gene 56, the ORF of gene 58, and the contiguous region of the gene 56 ORF-gene, 57 ORF-gene, 58 ORF were deleted was transfected into an MRC-5 cell to generate a recombinant virus. Consequently, it was revealed that these genes were non-essential genes. It has been expected that the ORF of the genes 13 and 57 may also be non-essential genes, and this was confirmed by this experiment. When gene 21, which has hitherto been expected as an essential gene, was knocked out, a recombinant virus could not be obtained. On the other hand, when gene 7, gene 46, gene 48, and gene 66, which have hitherto been expected as non-essential genes, were deleted, a recombinant virus could not be obtained.

[0171] When the plaque size of gene 56 deficient P-Oka, a gene proved as non-essential by this experiment, was compared to the P-Oka, the plaque size of gene 56 deficient P-Oka infected MRC-5 cells was slightly smaller than those in which other non-essential genes were deleted, but the difference was insignificant.

[0172] The above-mentioned results revealed that it is difficult to determine whether or not a varicella-zoster virus gene is necessary for proliferation of the virus based only upon the structure. Further, it is revealed that gene 56 and gene 58 are also non-essential genes, in addition to gene 13 and gene 57, which have hitherto been considered as non-essential genes, and the proliferation of the virus is not influenced when these genes are knocked out. In particular, even if gene 58 was deleted, the proliferation of the virus was not influenced at all. Therefore, it was revealed that, in addition to genes 13 and 57, genes 56 and 58, in particular the contiguous region from gene 56 to gene 58, are suitable genes for knockout and as such, are suitable genes for an insertion site of a foreign sequence (such as the BAC vector sequence and a gene sequence encoding another antigen).

### Example 2

### Production of a Multivalent Vaccine by Inserting Mumps Virus HN Gene into ORF of Gene 13

[0173] Due to the fact that in Example 1 gene 13 was revealed a suitable gene for knockout and/or insertion of a foreign sequence, a multivalent vaccine was produced by inserting the mumps virus HN gene into the ORF of gene 13.

[0174] HN gene and F gene of the mumps virus were amplified from a field epidemic strain, Iwasaki strain, using PCR. When the amino acid sequences of F gene and HN gene of the Iwasaki strain cloned were analyzed, it was found that the F gene showed relatively high homogeny with field strains and vaccine strains (>98.5%), whereas the HN gene showed high homogeny with field strains from the late 1990s but showed low homogeny with field strains before the early 1990s and vaccine strains (about 96%).

[0175] Then, a promoter/enhancer sequence of human cytomegalo virus (CMV) was operatively linked upstream of the cloned gene. The plasmids using HN gene and F gene were designated as pDEST26/MeV-HN and pDEST26/MeV-F, respectively. The promoter/enhancer sequence of human CMV has NF-κB binding sites, an AP-1 binding site, and a TATA box (FIG. 1).

[0176] The pDEST26/MeV-F and pDEST26/MeV-HN were transfected into 293 cells, and reactions of the resulting cells with several kinds of anti-MeV antibodies were performed using a fluorescent antibody method. As a result, the 293 cells in which pDEST26/MeV-F was transfected did not react with any antibody, but the cells in which the pDEST26/MeV-HN was transfected reacted with several kinds of anti-MeV antibodies (including antibodies having neutralizing activity).

[0177] The upstream and the downstream portions of gene 13 were linked to both ends of the nucleic acid to which the mumps virus HN gene and the CMV promoter/enhancer were bound, to prepare a vector (the base number is that in P-Oka, and in case of the Dumas strain shown in SEQ ID NO. 4, they correspond to 17037 to 18440 and 19347 to 20350, respectively). This vector was introduced into Escherichia coil having the P-Oka strain VZV-BAC-DNA, and homologous recombination was carried out between the vector and the P-Oka strain VZV-BAC-DNA to homologously recombine the ORF of the gene 13 with the linkage sequence of the mumps HN gene with the CMV promoter/enhancer (FIG. 2). The occurrence of homologous recombination was confirmed by restriction enzyme digestion and PCR.

[0178] Then, the BAC vector, produced by the homologous recombination, was transfected into MRC-5 cells by electroporation. The plaque size of the transfected cells was the same as that obtained in the virus whose gene 13 was intact.

[0179] In order to detect an HN gene product of mumps virus, the expression of the HN gene in the transfected cells was confirmed by using FITC labeled anti-mumps virus HN protein antibodies (mouse immunoglobulin/FITC goat F(ab′)2, DakoCytomation Denmark A/S, Produktionsvej 42, DK-2600 Glostrup, Denmark) and Alexa 594 labeled anti-mumps virus HN protein antibodies (Alexa Flour® 594, F(ab′) 2 fragment of goat anti-mouse IgG (H+L), Molecular Probes invitrogen detection technologies Eugene, Oreg., U.S.A.). As a result, the expression of the HN protein was confirmed using labeled antibodies.

[0180] According to this Example, a multivalent vaccine against both of the varicella-zoster virus and the mumps virus could be conveniently produced without inhibiting the proliferation of virus.

### Example 3

### Production of Mutant Recombinant Varicella-Zoster Virus with Low Pathogenicity

[0181] According to the present invention, it is possible to prepare a mutant recombinant varicella-zoster virus and to obtain a mutant varicella-zoster virus strain with low pathogenicity in a mutated virus using the following method.

### (1: Preparation of Mutant Recombinant Varicella-Zoster Virus)

[0182] As a method for preparing mutant recombinant varicella-zoster virus including, for example, homologous recombination between a nucleic acid containing a mutated gene and VZV-BAC-DNA plasmid to produce mutant recombinant varicella-zoster virus. A mutated gene, which is used to cause homologous recombination with VZV-BAC-DNA plasmid may include random mutation and may include site-directed mutation. By employing each of the above methods, it is possible to obtain a population of mutant recombinant varicella-zoster virus with random mutation and a population of mutant recombinant varicella-zoster virus with site-directed mutation. The detailed description of the foregoing is as follows.

(1.1: Preparation of Mutant Recombinant Varicella-Zoster Virus with Random Mutation)

[0183] It is known that some of viruses which contain mutation in gene 62 of varicella-zoster virus genome are attenuated viruses. Therefore, in the present Example, gene 62 to which a mutation is randomly introduced using PCR is produced. The method of mutagenesis using PCR is well known. For example, it is possible to introduce a mutation randomly by using thermostable polymerase without proofreading function under the condition that the amount of one of the four nucleotides is small. Optionally, a marker gene such as a drug-resistance gene may be linked to the mutated 62 gene.

[0184] Thus, the prepared mutated gene 62 is introduced into E. coli with the VZV-BAC-DNA plasmid by electroporation, and then homologous recombination is carried out between mutated gene 62 and VZV-BAC-DNA. After that, the recombinant DNA of varicella-zoster virus is isolated and introduced to new E. coli, and E. coli producing the recomibinant VZV-BAC-DNA is obtained.

[0185] The obtained plurality of E. coli contains VZV-BAC-DNA including gene 62 having mutations which are different from each other. Then, the degree of pathogenicity of varicella-zoster virus which is produced by mutant VZV-BAC-DNA included in each E. coli is screened using a method below (2: method of examining the pathogenicity of varicella-zoster virus).

### (1.2: Preparation of Mutant Recombinant Varicella-Zoster Virus Containing a Site-Directed Mutation)

[0186] The methods for introducing the desired site-directed mutation is well-known in the art. For example, the full-length gene containing the desired mutation is prepared by conducting PCR using primers containing the desired mutation so as to prepare the fragment of the gene containing the desired mutation, and then, by further conducting PCR using the fragments of the mutated gene or by treating with an enzyme, such as a restriction enzyme.

[0187] Thus, mutant recombinant varicella-zoster virus containing a site-directed mutation is prepared using the procedure of above-mentioned (1.1.), regarding the prepared mutated gene.

### (2: Method of Examining the Pathogenicity of Varicella-Zoster Virus)

[0188] The two methods for examining the pathogenicity of varicella-zoster virus have been established.

[0189] As a method using an animal model, the method for evaluating the pathogenicity by producing a severe combined immunodeficient (SCID) mouse to which human skin is transplanted, and then, to infect the mouse with varicella-zoster virus is well-known (J. Viro 1. 1998 February; 72(2): 965-74).

[0190] On the other hand, as a method for evaluating the pathogenicity in vitro is well-known, which comprises: placing monolayer cultured human melanoma in a lower-well of a two-layered well, which are separated by a trans-well of pore size 3 μm; placing cord-blood mononuclear cells (CBMC) infected with varicella-zoster virus in the upper-well; and culturing the cells for 7-8 days; then observing CPE (cytopathic effect) of the melanoma (J. Virol. 2000 February; 74(4): 1864-70).

[0191] Although it is not the method for confirming the pathogenicity directly, according to the previous study of the present inventors (J. Virol. 2002 November; 76(22): 11447-59), close relationships between the pathogenicity and the proliferation of a virus is understood, thus, it is also possible to evaluate the pathogenicity indirectly by examining the proliferation of cell-to-cell employing infectious center assay.

### Example 4

### Production of Vaccine

[0192] The recombinant varicella-zoster virus obtained in Example 2 is inoculated in MRC-5 cell culture in 20 Roux bottles having a culture area of 210 cm², followed by culturing. After completion of culturing, culture medium is discarded, and the infected cells in each Roux bottle are washed with 200 ml of PBS(-) twice. Next, 20 ml of 0.03% (w/v) EDTA-3Na is overlaid on the infected cells in each Roux bottle, so that the cells are detached from the wall of the Roux bottle and suspended. The infected cell suspension in each Roux bottle is pooled, followed by centrifugation at 2,000 rpm for 10 minutes at 4° C. to collect a pellet of the infected cells. The cells are resuspended in 100 ml of PBS(-), followed by freezing and thawing once. Next, the cells are subjected to ultrasonication in ice bath (20 KHz, 150 mA, 0.3 sec/ml), followed by centrifugation at 3,000 rpm for 20 minutes at 4° C. The supernatant containing viruses released from the cells is collected, which is used as a live vaccine stock solution. 30 ml of the stock solution is sampled for examination, while saccharose and gelatin hydrolysate dissolved in PBS(-), which serves as a vaccine stabilizer, is added and mixed into the remaining stock solution (70 ml) to a final concentration of 5% (w/v) and 2.5% (w/v). As a result, 140 ml of a live vaccine final bulk was prepared. 30 ml of the final bulk is sampled for examination. Thereafter, the remainder of the bulk is dispensed into 3 ml volume vials (0.5 ml for each). After lyophilization, the vial is filled with nitrogen gas and is closed with a rubber cap to hermetically seal the inside of the vial. The live vaccine aliquots are preserved at 4° C. Immediately before use, 0.5 ml of distilled water for injection is added to the lyophilized contents which are completely dissolved. On the other hand, the above-described sampled vaccine stock solution and final bulk, and 20 aliquots are subjected to assay tests. The tests are conducted to confirm safety, effectiveness, and uniformity for qualification of a live vaccine, taking into consideration the Guidelines for Biological Formulations defined under Notice No. 195 of Ministry of Health and Welfare (1989) and the guideline “recombinant precipitation hepatitis B vaccine (derived from yeast)” as defined therein. The results of the tests show that the above-described aliquot has a virus content of 2×10⁴ PFU (plaque-forming unit)/0.5 ml. When passing each test described in the guidelines, the vaccine is subsequently used as a qualified live vaccine.

### Example 5

### Determination of Immunogenicity of Recombinant Varicella-Zoster Virus Vaccine

[0193] Immunogenicity of recombinant varicella-zoster virus vaccine strain produced in Example 4 is measured using guinea-pigs. Oka strain live vaccine is used as a control. These vaccines are subcutaneously vaccined to each of three guinea pigs of 3 weeks old (average weight is 250 g). Vaccination is adjusted by diluting each vaccine using PBS (-) so that the amount of recombinant strain and Oka strain live vaccine is 3,000 PFU/guinea pig or 2,000 PFU/guinea pig. Four, six, and eight weeks after vaccination, blood is collected from the vein in the femoral region of each vaccined guinea pig to measure the antibody value in the blood. The Neutralizing test method (Journal of General Virology, 61, 255-269, 1982) is employed for measurement of antibody value. It is confirmed that the recombinant varicella-zoster virus vaccine elicit anti-VZV antibody to the same degree with Oka strain. From these results, recombinant varicella-zoster virus vaccine with good immunogenicity is selected.

[0194] Although certain preferred embodiments have been described herein, it is not intended that such embodiments be construed as limitations on the scope of the invention except as set forth in the appended claims. Various other modifications and equivalents will be apparent to and can be readily made by those skilled in the art, after reading the description herein, without departing from the scope and spirit of this invention. All patents, published patent applications and publications cited herein are incorporated by reference as if set forth fully herein.

[0195] The present invention provides a method for producing a vaccine comprising recombinant varicella-zoster virus antigen and another virus antigen using, for example, BAC (bacterial artificial chromosome); recombinant varicella-zoster virus was produced by this method. The present invention also provides a multivalent vaccine comprising antigen of recombinant varicella-zoster virus and the like.

[0196] Further, the present invention provides a vector comprising a varicella-zoster virus genome and a BAC vector sequence, a cell containing such a vector, and a nucleic acid cassette comprising a fragment capable of homologous recombination with a varicella-zoster virus genome, and a BAC vector sequence.

### DESCRIPTION OF SEQUENCE TABLE

[0197] SEQ ID NO.: 1, nucleic acid sequence of the gene 62
SEQ ID NO.: 2, amino acid sequence of the gene 62
SEQ ID NO.: 3, sequence of plasmid PHA-2
SEQ ID NO.: 4, varicella-zoster virus Dumas strain
SEQ ID NO.: 5, amino acid sequence (gene 2) encoded in 5′ to 3′ direction in 1134 to 1850 position of SEQ ID NO.: 4
SEQ ID NO.: 6, amino acid sequence (gene 7) encoded in 5′ to 3′ direction in 8607 to 9386 position of SEQ ID NO.: 4
SEQ ID NO.: 7, amino acid sequence (gene 9A) encoded in 5′ to 3′ direction in 10642 to 10902 position of SEQ ID NO.: 4
SEQ ID NO.: 8, amino acid sequence (gene 9) encoded in 5′ to 3′ direction in 11009 to 11917 position of SEQ ID NO.: 4
SEQ ID NO.: 9, amino acid sequence (gene 10) encoded in 5′ to 3′ direction in 12160 to 13392 position of SEQ ID NO.: 4
SEQ ID NO.: 10, amino acid sequence (gene 11) encoded in 5′ to 3′ direction in 13590 to 16049 position of SEQ ID NO. 4
SEQ ID NO.: 11, amino acid sequence (gene 12) encoded in 5′ to 3′ direction in 16214 to 18199 position of SEQ ID NO. 4
SEQ ID NO.: 12, amino acid sequence (gene 13) encoded in 5′ to 3′ direction in 18441 to 19346 position of SEQ ID NO. 4
SEQ ID NO.: 13, amino acid sequence (gene 17) encoded in 5′ to 3′ direction in 24149 to 25516 position of SEQ ID NO.: 4
SEQ ID NO.: 14, amino acid sequence (gene 21) encoded in 5′ to 3′ direction in 30759 to 33875 position of SEQ ID NO. 4
SEQ ID NO.: 15, amino acid sequence (gene 22) encoded in 5′ to 3′ direction in 34083 to 42374 position of SEQ ID NO. 4
SEQ ID NO.: 16, amino acid sequence (gene 26) encoded in 5′ to 3′ direction in 44506 to 46263 position of SEQ ID NO. 4
SEQ ID NO.: 17, amino acid sequence (gene 29) encoded in 5′ to 3′ direction in 50857 to 54471 position of SEQ ID NO. 4
SEQ ID NO.: 18, amino acid sequence (gene 30) encoded in 5′ to 3′ direction in 54651 to 56963 position of SEQ ID NO. 4
SEQ ID NO.: 19, amino acid sequence (gene 31) encoded in 5′ to 3′ direction in 57008 to 59614 position of SEQ ID NO. 4
SEQ ID NO.: 20, amino acid sequence (gene 32) encoded in 5′ to 3′ direction in 59766 to 60197 position of SEQ ID NO. 4
SEQ ID NO.: 21, amino acid sequence (gene 36) encoded in 5′ to 3′ direction in 64807 to 65832 position of SEQ ID NO. 4
SEQ ID NO.: 22, amino acid sequence (gene 37) encoded in 5′ to 3′ direction in 66074 to 68599 position of SEQ ID NO.: 4
SEQ ID NO.: 23, amino acid sequence (gene 39) encoded in 5′ to 3′ direction in 70633 to 71355 position of SEQ ID NO. 4
SEQ ID NO.: 24, amino acid sequence encoded (gene 40) in 5′ to 3′ direction 71540 to 75730 position of SEQ ID NO.: 4
SEQ ID NO.: 25, amino acid sequence (gene 41) encoded in 5′ to 3′ direction in 75847 to 76797 position of SEQ ID NO. 4
SEQ ID NO.: 26, amino acid sequence (gene 43) encoded in 5′ to 3′ direction in 78170 to 80200 position of SEQ ID NO. 4
SEQ ID NO.: 27, amino acid sequence (gene 44) encoded in 5′ to 3′ direction in 80360 to 81451 position of SEQ ID NO. 4
SEQ ID NO.: 28, amino acid sequence (gene 46) encoded in 5′ to 3′ direction in 82719 to 83318 position of SEQ ID NO. 4
SEQ ID NO.: 29, amino acid sequence (gene 48) encoded in 5′ to 3′ direction in 84667 to 86322 position of SEQ ID NO. 4
SEQ ID NO.: 30, amino acid sequence (gene 51) encoded in 5′ to 3′ direction in 87881 to 90388 position of SEQ ID NO. 4
SEQ ID NO.: 31, amino acid sequence (gene 52) encoded in 5′ to 3′ direction in 90493 to 92808 position of SEQ ID NO.: 4
SEQ ID NO.: 32, amino acid sequence (gene 55) encoded in 5′ to 3′ direction in 95996 to 98641 position of SEQ ID NO.: 4
SEQ ID NO.: 33, amino acid sequence (gene 63) encoded in 5′ to 3′ direction in 110581 to 111417 position of SEQ ID NO.: 4
SEQ ID NO.: 34, amino acid sequence (gene 64) encoded in 5′ to 3′ direction in 111565 to 112107 position of SEQ ID NO.: 4
SEQ ID NO.: 35, amino acid sequence (gene 66) encoded in 5′ to 3′ direction in 113037 to 114218 position of SEQ ID NO.: 4
SEQ ID NO.: 36, amino acid sequence (gene 67) encoded in 5′ to 3′ direction in 114496 to 115560 position of SEQ ID NO.: 4
SEQ ID NO.: 37, amino acid sequence (gene 68) encoded in 5′ to 3′ direction in 115808 to 117679 position of SEQ ID NO.: 4
SEQ ID NO.: 38, amino acid sequence (gene 71) encoded in 5′ to 3′ direction in 120764 to 124696 position of SEQ ID NO.: 4
SEQ ID NO.: 39, partial sequence of SEQ ID NO.: 4 (gene 27)
SEQ ID NO.: 40, amino acid sequence (gene 27) encoded in 5′ to 3′ direction in 1 to 999 position of SEQ ID NO.: 39
SEQ ID NO.: 41, partial sequence of SEQ ID NO.: 4 (gene 47)
SEQ ID NO.: 42, amino acid sequence (gene 47) encoded in 5′ to 3′ direction in 1 to 1530 position of SEQ ID NO.: 41
SEQ ID NO.: 43, partial sequence of SEQ ID NO.: 4
SEQ ID NO.: 44, amino acid sequence (gene 49) encoded in 5′ to 3′ direction in 1 to 243 position of SEQ ID NO.: 43
SEQ ID NO.: 45, partial sequence of SEQ ID NO.: 4
SEQ ID NO.: 46, amino acid sequence (gene 56) encoded in 5′ to 3′ direction in 1 to 732 position of SEQ ID NO.: 45
SEQ ID NO.: 47, complementary strand sequence of SEQ ID NO.: 4
SEQ ID NO.: 48, amino acid sequence (corresponding to 5569 to 6405 position of SEQ ID No.: 47) (gene 70) encoded in 3′ to 5′ direction in 118480 to 119316 position of SEQ ID NO.: 4

[0198] SEQ ID NO.: 49, amino acid sequence (corresponding to 6553 to 7095 position of SEQ ID No.: 47) (gene 69) encoded in 3′ to 5′ direction in 117790 to 118332 position of SEQ ID NO.: 4

[0199] SEQ ID NO.: 50, amino acid sequence (corresponding to 12245 to 12553 position of SEQ ID No.: 47) (gene 65) encoded in 3′ to 5′ direction in 112332 to 112640 position of SEQ ID NO.: 4

SEQ ID NO.: 51, amino acid sequence (corresponding to 15752 to 19684 position of SEQ ID No.: 47) (gene 62) encoded in 3′ to 5′ direction in 105201 to 109133 position of SEQ ID NO.: 4
SEQ ID NO.: 52, amino acid sequence (corresponding to 20400 to 21803 position of SEQ ID No.: 47) (gene 61) encoded in 3′ to 5′ direction in 103082 to 104485 position of SEQ ID NO.: 4
SEQ ID NO.: 53, amino acid sequence (corresponding to 23666 to 24583 position of SEQ ID No.: 47) (gene 59) encoded in 3′ to 5′ direction in 100302 to 101219 position of SEQ ID NO.: 4
SEQ ID NO.: 54, amino acid sequence (corresponding to 25259 to 25474 position of SEQ ID No.: 47) (gene 57) encoded in 3′ to 5′ direction in 99411 to 99626 position of SEQ ID NO.: 4
SEQ ID NO.: 55, amino acid sequence (corresponding to 31035 to 32030 position of SEQ ID No.: 47) (gene 53) encoded in 3′ to 5′ direction in 92855 to 93850 position of SEQ ID NO.: 4
SEQ ID NO.: 56, amino acid sequence encoded (corresponding to 54592 to 56217 position of SEQ ID No.: 47) (gene 38) in 3′ to 5′ direction in 68668 to 70293 position of SEQ ID NO.: 4
SEQ ID NO.: 57, amino acid sequence (corresponding to 60132 to 60908 position of SEQ ID No.: 47) (gene 35) encoded in 3′ to 5′ direction in 63977 to 64753 position of SEQ ID NO.: 4
SEQ ID NO.: 58, amino acid sequence (corresponding to 60975 to 62714 position of SEQ ID No.: 47) (gene 34) encoded in 3′ to 5′ direction in 62171 to 63910 position of SEQ ID NO.: 4
SEQ ID NO.: 59, amino acid sequence (corresponding to 62747 to 64564 position of SEQ ID No.: 47) (gene 33) encoded in 3′ to 5′ direction in 60321 to 62138 position of SEQ ID NO.: 4
SEQ ID NO.: 60, amino acid sequence (corresponding to 74249 to 77833 position of SEQ ID No.: 47) (gene 28) encoded in 3′ to 5′ direction in 47052 to 50636 position of SEQ ID NO.: 4
SEQ ID NO.: 61, amino acid sequence (corresponding to 80267 to 80737 position of SEQ ID No.: 47) (gene 25) encoded in 3′ to 5′ direction in 44148 to 44618 position of SEQ ID NO.: 4
SEQ ID NO.: 62, amino acid sequence (corresponding to 80864 to 81673 position of SEQ ID No.: 47) (gene 24) encoded in 3′ to 5′ direction in 43212 to 44021 position of SEQ ID NO.: 4
SEQ ID NO.: 63, amino acid sequence (corresponding to 81747 to 82454 position of SEQ ID No.: 47) (gene 23) encoded in 3′ to 5′ direction in 42431 to 43138 position of SEQ ID NO.: 4
SEQ ID NO.: 64, amino acid sequence (corresponding to 94410 to 95861 position of SEQ ID No.: 47) (gene 20) encoded in 3′ to 5′ direction in 29024 to 30475 position of SEQ ID NO.: 4
SEQ ID NO.: 65, amino acid sequence (corresponding to 96040 to 98367 position of SEQ ID No.: 47) (gene 19) encoded in 3′ to 5′ direction in 26518 to 28845 position of SEQ ID NO.: 4
SEQ ID NO.: 66, amino acid sequence (corresponding to 98392 to 99312 position of SEQ ID No.: 47) (gene 18) encoded in 3′ to 5′ direction in 25573 to 26493 position of SEQ ID NO.: 4
SEQ ID NO.: 67, amino acid sequence (corresponding to 101091 to 102317 position of SEQ ID No.: 47) (gene 16) encoded in 3′ to 5′ direction in 22568 to 23794 position of SEQ ID NO.: 4
SEQ ID NO.: 68, amino acid sequence (corresponding to 102407 to 103627 position of SEQ ID No.: 47) (gene 15) encoded in 3′ to 5′ direction in 21258 to 22478 position of SEQ ID NO.: 4
SEQ ID NO.: 69, amino acid sequence (corresponding to 103772 to 105454 position of SEQ ID No.: 47) (gene 14) encoded in 3′ to 5′ direction in 19431 to 21113 position of SEQ ID NO.: 4
SEQ ID NO.: 70, amino acid sequence (corresponding to 114218 to 115408 position of SEQ ID No.: 47) (gene 8) encoded in 3′ to 5′ direction in 9477 to 10667 position of SEQ ID NO.: 4
SEQ ID NO.: 71, amino acid sequence (corresponding to 116308 to 119559 position of SEQ ID No.: 47) (gene 6) encoded in 3′ to 5′ direction in 5326 to 8577 position of SEQ ID NO.: 4
SEQ ID NO.: 72, amino acid sequence (corresponding to 119611 to 120633 position of SEQ ID No.: 47) (gene 5) encoded in 3′ to 5′ direction in 4252 to 5274 position of SEQ ID NO.: 4
SEQ ID NO.: 73, amino acid sequence (corresponding to 120744 to 122102 position of SEQ ID No.: 47) (gene 4) encoded in 3′ to 5′ direction 2783 to 4141 position of SEQ ID NO.: 4
SEQ ID NO.: 74, amino acid sequence (corresponding to 122438 to 122977 position of SEQ ID No.: 47) (gene 3) encoded in 3′ to 5′ direction in 1908 to 2447 position of SEQ ID NO.: 4
SEQ ID NO.: 75, amino acid sequence (corresponding to 123970 to 124296 position of SEQ ID No.: 47) (gene 1) encoded in 3′ to 5′ direction in 589 to 915 position of SEQ ID NO.: 4
SEQ ID NO.: 76, partial sequence of SEQ ID No.: 47
SEQ ID NO.: 77, amino acid sequence (corresponding to 46847 to 48034 position and 42292 to 43347 position of SEQ ID No.: 47) (gene 42 and gene 45) encoded in 3′ to 5′ direction in 1 to 1056 position and 4556 to 5740 position of SEQ ID NO. 76
SEQ ID NO.: 78, partial sequence of SEQ ID No.: 47
SEQ ID NO.: 79, amino acid sequence (corresponding to 123580 to 124884 position of SEQ ID No.: 47) (gene 50) encoded in 3′ to 5′ direction in 1 to 1305 position of SEQ ID NO.: 78
SEQ ID NO.: 80, partial sequence of SEQ ID No.: 47
SEQ ID NO.: 81, amino acid sequence (corresponding to 122578 to 124884 position of SEQ ID No.: 47) (gene 54) encoded in 3′ to 5′ direction in 1 to 2307 position of SEQ ID NO.: 80
SEQ ID NO.: 82, partial sequence of SEQ ID No.: 47
SEQ ID NO.: 83, amino acid sequence (corresponding to 124222 to 124884 position of SEQ ID No.: 47) (gene 58) encoded in 3′ to 5′ direction in 1 to 663 position of SEQ ID NO.: 82
SEQ ID NO.: 84, partial sequence of SEQ ID No.: 47
SEQ ID NO.: 85, amino acid sequence (corresponding to 124458 to 124884 position of SEQ ID No.: 47) (gene 60) encoded in 3′ to 5′ direction in 1 to 427 position of SEQ ID NO.: 84
SEQ ID NO.: 86, partial sequence of SEQ ID No.: 47
SEQ ID NO.: 87, amino acid sequence (corresponding to 60321 to 61229 of SEQ ID No.: 47) (gene 33.5) encoded in 3′ to 5′ direction in 1 to 903 position of SEQ ID NO.: 86

The application's sequence listing, which the Patent Office published only in electronic form, follows.

SEQUENCE LISTING (87 sequences)

SEQ ID NO: 1 - DNA, 4226 bp, Varicella zoster
  misc_feature (99)..(99): The 'Xaa' at location 99 stands for Thr or Met.
  misc_feature (512)..(512): The 'Xaa' at location 512 stands for Ala or Val.
  misc_feature (1275)..(1275): The 'Xaa' at location 1275 stands for Ser, Leu or Asn.
  CDS (229)..(4158)
atactatggtccatgaacttcccgcctcgagtctcgtccaatcactacatcgtcttatcattaagaatatttacacggtgacgacacggggaggaaatatgcggtcgaggggggggcacaacacgttttaagtactgttggaactccctcaccaaccgcaaycgcaatcctttgaaggctgcgagagcgtttggaaaactcgggtacgtctaaattcaccccagygcgatggatacgccgccgatgcagcgctctacaccccaacgcgcggggtcgcctgatactttggagttaatggacctgttggacgcggccgccgcggccgccgaacacagggcccgggtggtcacctcgagtcagcctgacgatctactatttggagagaacggggtcatggtgggacgggaacatgagatcgtttcaattccctccgtatcgggacttcaaccagaacccagaacggaagatgttggcgaagagctaacacaagacgactacgtatgcgaggacggtcaggatctaaygggctcgcctgtaatcccgctggccgaggtcttccacacccgattctcggaggccggcgcgcgagaaccaacaggagccgatcgctccctcgagacagtctctctcggaacgaagcttgctaggtctccaaaaccaccgatgaacgatggggaaacgggcagaggtacgacccctccgttcccgcaggccttctcccctgtatcccccgcgtctcctgttggagacgccgccgggaacgatcaacgggaagaccagcggtctataccccgacaaacgacgagaggaaattcaccaggtttgccgtcggtggtccatcgagacagacaaactcagtccatctcgggtaaaaagccgggcgatgagcaagcgggtcatgcgcatgcatcgggggacggagtagttctccagaaaactcaacggcccgctcagggaaagagcccgaagaaaaagactttgaaggttaaggtcccactcccggcgcggaaacccggtggacctgtacccggcccggttgagcaattgtaccacgtcctttcggacagcgttcccgctaagggggcaaaggcggacctgccgtttgagaccgatgatacccgcccaaggaaacatgatgcccggggtataacacctcgcgtccctggacgttcgtcggggggcaaacctagagcgtttttggccctgccgggaagatcccacgcaccagacccgattgaggatgacagcccggtggagaaaaagccaaagagtcgtgagtttgtttcgtcttcatcctcttcctcgtcgtggggatcgtcatcggaggatgaagacgatgaaccccggcgcgtttcggtgggaagtgaaactacaggcagcaggtccggacgcgaacacgccccttccccgtcaaattcggatgattcggactcaaatgatggtgggtcgacgaaacaaaatatccaaccgggatatcgatccatcagcggtcccgatccgaggattcgtaagaccaaacgtcttgcgggggaaccggggcgccagagacagaaatcattttccctgccgcgatccagaaccccgataattcccccggtgtcggggccgctcatgatgcccgacggaagcccttggcccggatcggcgcccctcccatccaacagggtgcggtttggaccgtccggggagaccagagagggtcactgggaggatgaggctgtgagagcggcgcgggctcgttacgaggcctcaactgaacccgygccgctttacgtgccggagttgggagatccggctagacagtaccgcgcgctgattaacctgatctactgtccagacagagaccctatagcatggctccagaaccccaagctgaccggtgtcaactcggccctgaaccagttctaccaaaagctgttgccaccgggacgggcgggtaccgccgttacggggagcgtagcgtctcccgttccgcatgtaggcgaagccatggccacgggggaggccctctgggctctcccccacgcggccgcggccgtggctatgagccgtcggtacgaccgggcccaaaaacactttatcctacagagtctccgcagagcctttgccggcatggcataccccgaggcaacgggctccagtccggcggcgcggatctcccgcggtcacccttctccaacaaccccggccacacagactcccgaccctcagccgtcggccgccgcgcgctctctttctgtgtgtccaccggatgatcgtttacgaactccgcgcaagcgcaagtcccagccagtcgagagcagaagcctcctcgacaagattagggagacacccgtcgcggacgcccgggttgcagacgatcatgtggtttccaaggccaagaggcgggtatccgagcccgtgaccatcacctcgggccctgtggtggatccccccgccgtaataacgatgccacttgacggaccggccccaaacgggggatttcggcgtattccccggggggccctgcataccccggtcccgtcggaccaggctcgcaaggcgtactgtacccccgaaaccatcgcccgtctggtcgacgacccattgtttcccacggcctggcgccctgcgctaagctttgatcccggcgccttggcggaaatcgccgctcggcgtccgggcggaggagaccgacggtttggtccacccagcggagtggaggcgctgcgacggaggtgcgcctggatgcggcagatcccagacccggaggatgtgaggcttctgatcatctacgatccgttgcccggagaggacatcaacggccccctcgagagcaccctcgcgacagatccgggaccgtcatggagtccatcccgagggggactgtctgtggtcctggcagccctgagtaaccggttgtgcctgccgagcactcatgcctgggccgggaactggaccggcccgccggacgtgtccgctttgaacgcccggggcgttttattactgtcgacccgagacctggcctttgccggggccgtcgagtatctaggctcgcggttggcctctgcccggcgccggttgctggtgttggacgcggtggccctcgagaggtggcccggggatggacccgctttgtctcagtatcacgtgtacgtccgggccccggcgcgaccggacgcccaggccgtcgtccgatggccagactcggcggtcacagaaggactcgcccgggccgtgtttgcatcgtcgcgcacctttgggccagcgagttttgctcgtatcgagactgcgtttgccaacctgtacccgggcgaacaacccctgtgtttgtgccgcggtgggaacgtcgcatacaccgtgtgtacccgcgcgggccccaagacccgcgtccccctgtcgccccgtgaataccggcagtacgtgctgccgggttttgacggttgcaaggacctcgcgcgacagtctcggggtctggggctcggggcagccgactttgtggacgaggcggcacatagccaccgcgcagcaaaccgatggggcctgggtgccgcgcttcgacccgtcttccttcccgagggacggagaccgggggccgccgggccggaggccggcgacgtacccacctgggcgagggtgttttgccgccacgccctgctggaacccgaccctgccgcggaaccactcgtgcttccacccgtggccggtcggtcggtggcgctgtatgcgtcggcggacgaggctcggaatgccctccccccgattcccagagtaatgtggccgcccggttttggggccgcggagacggtgttggaggggagcgacggaacacggttcgcgttcggacaccacgggggctcggaacggccggcagaaacccaggcggggcgacagcggcgcaccgcagacgacagagaacacgctttggagccggacgattgggaggtggggtgtgaagacgcgtgggacagcgaggaggggggcggggacgacggggacgcaccggggtcatcctttggggtgagcgtcgtgtcggtggccccgggtgtgctgcgagaccgccgggtgggctygcgcccggcggtcaaggtggagctgttgtcctcgtcctcgtcctccgaggacgaggacgatgtgtggggagggcgcggggggaggagccccccgcagagtcgggggtgacggagtcccctccttttctcgtgagcgccacyggcgcgcggactgtttgttgtttgttaataaaa

SEQ ID NO: 2 - protein, 1310 aa, Varicella zoster
  misc_feature (99)..(99): The 'Xaa' at location 99 stands for Thr or Met.
  misc_feature (512)..(512): The 'Xaa' at location 512 stands for Ala or Val.
  misc_feature (1275)..(1275): The 'Xaa' at location 1275 stands for Ser, Leu or Asn.
MDTPPMQRSTPQRAGSPDTLELMDLLDAAAAAAEHRARVVTSSQPDDLLFGENGVMVGREHEIVSIPSVSGLQPEPRTEDVGEELTQDDYVCEDGQDLXGSPVIPLAEVFHTRFSEAGAREPTGADRSLETVSLGTKLARSPKPPMNDGETGRGTTPPFPQAFSPVSPASPVGDAAGNDQREDQRSIPRQTTRGNSPGLPSVVHRDRQTQSISGKKPGDEQAGHAHASGDGVVLQKTQRPAQGKSPKKKTLKVKVPLPARKPGGPVPGPVEQLYHVLSDSVPAKGAKADLPFETDDTRPRKHDARGITPRVPGRSSGGKPRAFLALPGRSHAPDPIEDDSPVEKKPKSREFVSSSSSSSSWGSSSEDEDDEPRRVSVGSETTGSRSGREHAPSPSNSDDSDSNDGGSTKQNIQPGYRSISGPDPRIRKTKRLAGEPGRQRQKSFSLPRSRTPIIPPVSGPLMMPDGSPWPGSAPLPSNRVRFGPSGETREGHWEDEAVRAARARYEASTEPXPLYVPELGDPARQYRALINLIYCPDRDPIAWLQNPKLTGVNSALNQFYQKLLPPGRAGTAVTGSVASPVPHVGEAMATGEALWALPHAAAAVAMSRRYDRAQKHFILQSLRRAFAGMAYPEATGSSPAARISRGHPSPTTPATQTPDPQPSAAARSLSVCPPDDRLRTPRKRKSQPVESRSLLDKIRETPVADARVADDHVVSKAKRRVSEPVTITSGPVVDPPAVITMPLDGPAPNGGFRRIPRGALHTPVPSDQARKAYCTPETIARLVDDPLFPTAWRPALSFDPGALAEIAARRPGGGDRRFGPPSGVEALRRRCAWMRQIPDPEDVRLLIIYDPLPGEDINGPLESTLATDPGPSWSPSRGGLSVVLAALSNRLCLPSTHAWAGNWTGPPDVSALNARGVLLLSTRDLAFAGAVEYLGSRLASARRRLLVLDAVALERWPGDGPALSQYHVYVRAPARPDAQAVVRWPDSAVTEGLARAVFASSRTFGPASFARIETAFANLYPGEQPLCLCRGGNVAYTVCTRAGPKTRVPLSPREYRQYVLPGFDGCKDLARQSRGLGLGAADFVDEAAHSHRAANRWGLGAALRPVFLPEGRRPGAAGPEAGDVPTWARVFCRHALLEPDPAAEPLVLPPVAGRSVALYASADEARNALPPIPRVMWPPGFGAAETVLEGSDGTRFAFGHHGGSERPAETQAGRQRRTADDREHALEPDDWEVGCEDAWDSEEGGGDDGDAPGSSFGVSVVSVAPGVLRDRRVGXRPAVKVELLSSSSSSEDEDDVWGGRGGRSPPQSRG

SEQ ID NO: 3 - DNA, 8878 bp, Artificial
  plasmid
ttaattaaggccgcagcttcctagataacttcgtatagcatacattatacgaagttatggatctcccgcccagcgtcttgtcattggcgaactcgaacacgcagatgcagtcggggcggcgcggtcccaggtccacttcgcatattaaggtgacacgcgcggcctcgaacacagctgcaggccatgagcgaaaaatacatcgtcacctgggacatgttgcagatccatgcacgtaaactcgcaagccgactgatgccttctgaacaatggaaaggcattattgccgtaagccgtggcggtctggtaccgggtgcgttactggcgcgtgaactgggtattcgtcatgtcgataccgtttgtatttccagctacgatcacgacaaccagcgcgagcttaaagtgctgaaacgcgcagaaggcgatggcgaaggcttcatcgttattgatgacctggtggataccggtggtactgcggttgcgattcgtgaaatgtatccaaaagcgcactttgtcaccatcttcgcaaaaccggctggtcgtccgctggttgatgactatgttgttgatatcccgcaagatacctggattgaacagccgtgggatatgggcgtcgtattcgtcccgccaatctccggtcgctaaccggtagcggatcatctagacccgggtaccgttaacttgtttattgcagcttataatggttacaaataaagcaatagcatcacaaatttcacaaataaagcatttttttcactgcattctagttgtggtttgtccaaactcatcaatgtatcttatcatgtctggatccccattctcatgtttgacagcttatcatcgaatttctgccattcatccgcttattatcacttattcaggcgtagcaaccaggcgtttaagggcaccaataactgccttaaaaaaattacgccccgccctgccactcatcgcagtactgttgtaattcattaagcattctgccgacatggaagccatcacagacggcatgatgaacctgaatcgccagcggcatcagcaccttgtcgccttgcgtataatatttgcccatggtgaaaacgggggcgaagaagttgtccatattggccacgtttaaatcaaaactggtgaaactcacccagggattggctgagacgaaaaacatattctcaataaaccctttagggaaataggccaggttttcaccgtaacacgccacatcttgcgaatatatgtgtagaaactgccggaaatcgtcgtggtattcactccagagcgatgaaaacgtttcagtttgctcatggaaaacggtgtaacaagggtgaacactatcccatatcaccagctcaccgtctttcattgccatacggaattccggatgagcattcatcaggcgggcaagaatgtgaataaaggccggataaaacttgtgcttatttttctttacggtctttaaaaaggccgtaatatccagctgaacggtctggttataggtacattgagcaactgactgaaatgcctcaaaatgttctttacgatgccattgggatatatcaacggtggtatatccagtgatttttttctccattttagcttccttagctcctgaaaatctcgataactcaaaaaatacgcccggtagtgatcttatttcattatggtgaaagttggaacctcttacgtgccgatcaacgtctcattttcgccaaaagttggcccagggcttcccggtatcaacagggacaccaggatttatttattctgcgaagtgatcttccgtcacaggtatttattcgcgataagctcatggagcggcgtaaccgtcgcacaggaaggacagagaaagcgcggatctgggaagtgacggacagaacggtcaggacctggattggggaggcggttgccgccgctgctgctgacggtgtgacgttctctgttccggtcacaccacatacgttccgccattcctatgcgatgcacatgctgtatgccggtataccgctgaaagttctgcaaagcctgatgggacataagtccatcagttcaacggaagtctacacgaaggtttttgcgctggatgtggctgcccggcaccgggtgcagtttgcgatgccggagtctgatgcggttgcgatgctgaaacaattatcctgagaataaatgccttggcctttatatggaaatgtggaactgagtggatatgctgtttttgtctgttaaacagagaagctggctgttatccactgagaagcgaacgaaacagtcgggaaaatctcccattatcgtagagatccgcattattaatctcaggagcctgtgtagcgtttataggaagtagtgttctgtcatgatgcctgcaagcggtaacgaaaacgatttgaatatgccttcaggaacaatagaaatcttcgtgcggtgttacgttgaagtggagcggattatgtcagcaatggacagaacaacctaatgaacacagaaccatgatgtggtctgtccttttacagccagtaggctcgccgcagtcgagcgacggcgaagccctcgagtgagcgaggaagcaccagggaacagcacttatatattctgcttacacacgatgcctgaaaaaacttcccttggggttatccacttatccacggggatatttttataattattttttttatagtttttagatcttcttttttagagcgccttgtaggcctttatccatgctggttctagagaaggtgttgtgacaaattgccctttcagtgtgacaaatcaccctcaaatgacagtcctgtctgtgacaaattgcccttaaccctgtgacaaattgccctcagaagaagctgttttttcacaaagttatccctgcttattgactcttttttatttagtgtgacaatctaaaaacttgtcacacttcacatggatctgtcatggcggaaacagcggttatcaatcacaagaaacgtaaaaatagcccgcgaatcgtccagtcaaacgacctcactgaggcggcatatagtctctcccgggatcaaaaacgtatgctgtatctgttcgttgaccagatcagaaaatctgatggcaccctacaggaacatgacggtatctgcgagatccatgttgctaaatatgctgaaatattcggattgacctctgcggaagccagtaaggatatacggcaggcattgaagagtttcgcggggaaggaagtggttttttatcgccctgaagaggatgccggcgatgaaaaaggctatgaatcttttccttggtttatcaaacgtgcgcacagtccatccagagggctttacagtgtacatatcaacccatatctcattcccttctttatcgggttacagaaccggtttacgcagtttcggcttagtgaaacaaaagaaatcaccaatccgtatgccatgcgtttatacgaatccctgtgtcagtatcgtaagccggatggctcaggcatcgtctctctgaaaatcgactggatcatagagcgttaccagctgcctcaaagttaccagcgtatgcctgacttccgccgccgcttcctgcaggtctgtgttaatgagatcaacagcagaactccaatgcgcctctcatacattgagaaaaagaaaggccgccagacgactcatatcgtattttccttccgcgatatcacttccatgacgacaggatagtctgagggttatctgtcacagatttgagggtggttcgtcacatttgttctgacctactgagggtaatttgtcacagttttgctgtttccttcagcctgcatggattttctcatactttttgaactgtaatttttaaggaagccaaatttgagggcagtttgtcacagttgatttccttctctttcccttcgtcatgtgacctgatatcgggggttagttcgtcatcattgatgagggttgattatcacagtttattactctgaattggctatccgcgtgtgtacctctacctggagtttttcccacggtggatatttcttcttgcgctgagcgtaagagctatctgacagaacagttcttctttgcttcctcgccagttcgctcgctatgctcggttacacggctgcggcgagcgctagtgataataagtgactgaggtatgtgctcttcttatctccttttgtagtgttgctcttattttaaacaactttgcggttttttgatgactttgcgattttgttgttgctttgcagtaaattgcaagatttaataaaaaaacgcaaagcaatgattaaaggatgttcagaatgaaactcatggaaacacttaaccagtgcataaacgctggtcatgaaatgacgaaggctatcgccattgcacagtttaatgatgacagcccggaagcgaggaaaataacccggcgctggagaataggtgaagcagcggatttagttggggtttcttctcaggctatcagagatgccgagaaagcagggcgactaccgcacccggatatggaaattcgaggacgggttgagcaacgtgttggttatacaattgaacaaattaatcatatgcgtgatgtgtttggtacgcgattgcgacgtgctgaagacgtatttccaccggtgatcggggttgctgcccataaaggtggcgtttacaaaacctcagtttctgttcatcttgctcaggatctggctctgaaggggctacgtgttttgctcgtggaaggtaacgacccccagggaacagcctcaatgtatcacggatgggtaccagatcttcatattcatgcagaagacactctcctgcctttctatcttggggaaaaggacgatgtcacttatgcaataaagcccacttgctggccggggcttgacattattccttcctgtctggctctgcaccgtattgaaactgagttaatgggcaaatttgatgaaggtaaactgcccaccgatccacacctgatgctccgactggccattgaaactgttgctcatgactatgatgtcatagttattgacagcgcgcctaacctgggtatcggcacgattaatgtcgtatgtgctgctgatgtgctgattgttcccacgcctgctgagttgtttgactacacctccgcactgcagtttttcgatatgcttcgtgatctgctcaagaacgttgatcttaaagggttcgagcctgatgtacgtattttgcttaccaaatacagcaatagtaatggctctcagtccccgtggatggaggagcaaattcgggatgcctggggaagcatggttctaaaaaatgttgtacgtgaaacggatgaagttggtaaaggtcagatccggatgagaactgtttttgaacaggccattgatcaacgctcttcaactggtgcctggagaaatgctctttctatttgggaacctgtctgcaatgaaattttcgatcgtctgattaaaccacgctgggagattagataatgaagcgtgcgcctgttattccaaaacatacgctcaatactcaaccggttgaagatacttcgttatcgacaccagctgccccgatggtggattcgttaattgcgcgcgtaggagtaatggctcgcggtaatgccattactttgcctgtatgtggtcgggatgtgaagtttactcttgaagtgctccggggtgatagtgttgagaagacctctcgggtatggtcaggtaatgaacgtgaccaggagctgcttactgaggacgcactggatgatctcatcccttcttttctactgactggtcaacagacaccggcgttcggtcgaagagtatctggtgtcatagaaattgccgatgggagtcgccgtcgtaaagctgctgcacttaccgaaagtgattatcgtgttctggttggcgagctggatgatgagcagatggctgcattatccagattgggtaacgattatcgcccaacaagtgcttatgaacgtggtcagcgttatgcaagccgattgcagaatgaatttgctggaaatatttctgcgctggctgatgcggaaaatatttcacgtaagattattacccgctgtatcaacaccgccaaattgcctaaatcagttgttgctcttttttctcaccccggtgaactatctgcccggtcaggtgatgcacttcaaaaagcctttacagataaagaggaattacttaagcagcaggcatctaaccttcatgagcagaaaaaagctggggtgatatttgaagctgaagaagttatcactcttttaacttctgtgcttaaaacgtcatctgcatcaagaactagtttaagctcacgacatcagtttgctcctggagcgacagtattgtataagggcgataaaatggtgcttaacctggacaggtctcgtgttccaactgagtgtatagagaaaattgaggccattcttaaggaacttgaaaagccagcaccctgatgcgaccacgttttagtctacgtttatctgtctttacttaatgtcctttgttacaggccagaaagcataactggcctgaatattctctctgggcccactgttccacttgtatcgtcggtctgataatcagactgggaccacggtcccactcgtatcgtcggtctgattattagtctgggaccacggtcccactcgtatcgtcggtctgattattagtctgggaccacggtcccactcgtatcgtcggtctgataatcagactgggaccacggtcccactcgtatcgtcggtctgattattagtctgggaccatggtcccactcgtatcgtcggtctgattattagtctgggaccacggtcccactcgtatcgtcggtctgattattagtctggaaccacggtcccactcgtatcgtcggtctgattattagtctgggaccacggtcccactcgtatcgtcggtctgattattagtctgggaccacgatcccactcgtgttgtcggtctgattatcggtctgggaccacggtcccacttgtattgtcgatcagactatcagcgtgagactacgattccatcaatgcctgtcaagggcaagtattgacatgtcgtcgtaacctgtagaacggagtaacctcggtgtgcggttgtatgcctgctgtggattgctgctgtgtcctgcttatccacaacattttgcgcacggttatgtggacaaaatacctggttacccaggccgtgccggcacgttaaccgggctgcatccgatgcaagtgtgtcgctgtcgagtttaaacatgcatagttattaatagtaatcaattacggggtcattagttcatagcccatatatggagttccgcgttacataacttacggtaaatggcccgcctggctgaccgcccaacgacccccgcccattgacgtcaataatgacgtatgttcccatagtaacgccaatagggactttccattgacgtcaatgggtggagtatttacggtaaactgcccacttggcagtacatcaagtgtatcatatgccaagtacgccccctattgacgtcaatgacggtaaatggcccgcctggcattatgcccagtacatgaccttatgggactttcctacttggcagtacatctacgtattagtcatcgctattaccatggtgatgcggttttggcagtacatcaatgggcgtggatagcggtttgactcacggggatttccaagtctccaccccattgacgtcaatgggagtttgttttggcaccaaaatcaacgggactttccaaaatgtcgtaacaactccgccccattgacgcaaatgggcggtaggcgtgtacggtgggaggtctatataagcagagctggtttagtgaaccgtcagatccgctagcgctaccggtcgccaccatggtgagcaagggcgaggagctgttcaccggggtggtgcccatcctggtcgagctggacggcgacgtaaacggccacaagttcagcgtgtccggcgagggcgagggcgatgccacctacggcaagctgaccctgaagttcatctgcaccaccggcaagctgcccgtgccctggcccaccctcgtgaccaccctgacctacggcgtgcagtgcttcagccgctaccccgaccacatgaagcagcacgacttcttcaagtccgccatgcccgaaggctacgtccaggagcgcaccatcttcttcaaggacgacggcaactacaagacccgcgccgaggtgaagttcgagggcgacaccctggtgaaccgcatcgagctgaagggcatcgacttcaaggaggacggcaacatcctggggcacaagctggagtacaactacaacagccacaacgtctatatcatggccgacaagcagaagaacggcatcaaggtgaacttcaagatccgccacaacatcgaggacggcagcgtgcagctcgccgaccactaccagcagaacacccccatcggcgacggccccgtgctgctgcccgacaaccactacctgagcacccagtccgccctgagcaaagaccccaacgagaagcgcgatcacatggtcctgctggagttcgtgaccgccgccgggatcactctcggcatggacgagctgtacaagtccggactcagatccaccggatctagataactgatcataatcagccataccacatttgtagaggttttacttgctttaaaaaacctcccacacctccccctgaacctgaaacataaaatgaatgcaattgttgttgttaacttgtttattgcagcttataatggttacaaataaagcaatagcatcacaaatttcacaaataaagcatttttttcactgcattctagttgtggtttgtccaaactcatcaatgtatcttaaatggccgcataacttcgtatagcatacattatacgaagttatctagcagatctgaattcgatatcaagctgcggccttaattaa

SEQ ID NO: 4 - DNA, 124884 bp, Varicella zoster
  CDS (1134)..(1850)
  CDS (8607)..(9386)
  CDS (10642)..(10902)
  CDS (11009)..(11917)
  CDS (12160)..(13392)
  CDS (13590)..(16049)
  CDS (16214)..(18199)
  CDS (18441)..(19346)
  CDS (24149)..(25516)
  CDS (30759)..(33875)
  CDS (34083)..(42374)
  CDS (44506)..(46263)
  CDS (50857)..(54471)
  CDS (54651)..(56963)
  CDS (57008)..(59614)
  CDS (59766)..(60197)
  CDS (64807)..(65832)
  CDS (66074)..(68599)
  CDS (70633)..(71355)
  CDS (71540)..(75730)
  CDS (75847)..(76797)
  CDS (78170)..(80200)
  CDS (80360)..(81451)
  CDS (82719)..(83318)
  CDS (84667)..(86322)
  CDS (87881)..(90388)
  CDS (90493)..(92808)
  CDS (95996)..(98641)
  CDS (110581)..(111417)
  CDS (111565)..(112107)
  CDS (113037)..(114218)
  CDS (114496)..(115560)
  CDS (115808)..(117679)
  CDS (120764)..(124696)
aggccagccctctcgcggccccctcgagagagaaaaaaaaaagcgaccccacctccccgcgcgtttgcggggcgaccatcgggggggatgggattttttgccgggaaacccccccccgccagcctttaacaaaacccgcgccttttgcgtccacccctcgtttactgctcggatggcgaccgtgcactactcccgccgacctgggaccccgccggtcaccctcacgtcgtcccccagcatggatgacgttgcgacccccatcccctacctacccacatacgccgaggccgtggcagacgcgccccccccttacagaagccgcgagagtctggtgttctccccgcctctttttcctcacgtggagaatggcaccacccaacagtcttacgattgcctagactgcgcttatgatggaatccacagacttcagctggcttttctaagaattcgcaaatgctgtgtaccggcttttttaattctttttggtattctcacccttactgctgtcgtggtcgccattgttgccgtttttcccgaggaacctcccaactcaactacatgaaactactgtccggaaggggaaggtatttattctcgcttgcagcttgtcgcgcgtgtatgcacaacaaaagctatatatgtcaccaaagccaacgtcgccatctggagtactacacccagtacgttgcataacctgtccatttgcattttcagttgcgcggacgcctttctccgggatcgtggccttgggacatcaaccagtggaataagaaccgccggtggtcttgtttgaacgacgagtggcgacgcgttgttctgcataagctctgtatgctgatacataaacacagagtctgtatcgctatcagattcccgaacaccttccggtaccccatactccgataccctggacattgcggatcccaaaaatataatattaacaggatttgcttatactttgctacagcttatataaatttatgtgcgatacatcttaagtgcatccgtacgttatttatacattgcctgtcacgtgaaaagactgtgttacccaataaaggttctacaaaaaatgctttattgggtgtttgtttaatagctattatcgtaacccacccccgtaaaatcataaaatgcatgtaatttctgagacacttgcatatgggcatgttcccgcatttattatgggctccactctggtgcgtcccagtttaaacgccaccgccgaggaaaatcccgcgtcagaaacgcgatgtttattacgagtgcttgcggggagaactgtagacctgccaggcggaggaacgttacacattacctgtaccaaaacctatgtaattattggcaaatatagcaaacccggcgaacgtcttagccttgcccgtctaatagggcgtgcaatgacgcctggaggtgcaaggacatttattattttggcgatgaaggaaaagcgatccacaacgcttgggtatgaatgtggtacgggcttgcatttactggctccatctatgggtacatttctccgcacacacggtttaagtaacagagatctctgtttatggcggggtaatatttatgatatgcatatgcaacgtcttatgttttgggagaatatcgcgcaaaataccactgaaacaccttgtataacgtcgacgttaacatgcaacttgacagaagactctggtgaagccgcacttaccacgtcagaccgacccactctcccaaccctaacagcccaaggaagaccaacagtttccaacattcgtggaatattgaaaggatccccccgtcaacagccggtctgtcaccgggttagatttgccgaacctacggagggcgtattgatgtaatcactaaataaaatacaccttttttcgattgtacgtatttttatttaaatgtgtagttcatagtccgccgacagccgctcgggcttttcccccacatacaacatgatcgtatgcctcggatgcaccggtccaacactccgccgagaagggggatttacaatgacagtgatacccaatagccgccagatgtacacccagctgtccggactccagcatcatctgctgagttgcggcgctgaagggtgcatcgcatagggtgttataattagccatttccggtaacagtcgttgggaatttaggaggctgcaaaacggctgtaggtcaacatacattggggattcagatggtttatctcgacgtccaagtccaatcaaaaaagcgtgtaaatcatcagcccggccgcatgttgctcgaagagcacataacctcttaacaccgtacagaggggatggcgtcggtgcatgtgagttggcagggcatgtccacgttgtttccaacgccagtggcggtataacttgtgtaaacgacgccaacgggtcaggtttaagattcactcggatgggttgactgctttcggaagctcccgttgtatccattaattaaacgttcggtacacgtctggtgtgtgttttacccgaatcagagacggaattgcaaagatattggtttgaaagcaatgtaatcccgcccatatatccccaacgtcgccttaaaaactcccacaatattacatttttattagtcttttattaatatagaatcacataaacaattgataaaatcaaggggtggtgtataatgattaaaaatataaattgatatgttttacaagcatgaaataggtatttactattctaacaggtaaatatgcttaatgattaaaaatacaaattagtatgttttgacaagcatgaaaaaggtattttttattttagcagttaaaggtactacacttaaaatatttaccgtatggacgggcgtcagaaagatgcccggcccaagttgagagggtacattcaacacgaccacactcgcgttggtgggtgattagggcctctaaaacaccggccagacatgacccgggtgtatattcttgtaacacttgaacgttacaactgatatcatcatattccacaaatttagagccacggacaactatattagcaatgcgggcaatcataacaaacatataagtagtaatacacgtgatatcactaaaacgttgctggcgcaacagttcggggagagtacgagaccccaaatcgttgtccctgtttagaagaagacatcttacaaaaggccccagctttaactttaaattctccaaaagtgacttcgaggttgcaacaatgggattatttgtgtagatgggcaagttttttgccgctaacattttaatccacgttaacagttcatccgcagactccaacgcttcaatcaaagattctccacgtatgactctctcacgcaacgcgcgggcaatacgtgagtccattttatatgactcaaaggtacgataaagttcatgtccgtacaacatcaactccggccaagatgtgttttgttttatccccggaaaacatccaccggaagcccatgaatcaccctcttgtattgtggcatatcggactaccagtttttcaattgtttcatctaaatggcgtaccgagtcaatggtcacgctggctcccgcggtggagacgacttcaatagcacggcccgtaattcgatcgaccgggatatcatactcttttcgaatacgctctcggcgggcgtctctcttggaaaatcgcaacctgtacgattcgtcatgtgtctgatcatttctttctcccgtggtcattgcaggaggcgttgtaggacgccgtcttcgatttgacagggatcgatcacggtgttttcttgaactttgagtgttataagatctggatgatcgtcgatgtccccgttcgatgcgtgcatatccagtctccacgtctcttcctccatgatggtttgaatcgggtaatacaacaaccaaagttttcgggcgattgtggtggtagctttcacgccttccgtgccttcgtttggaataccgtggattatatgctgtatctgcagtacgctccacatacacagttctagacgttgtggagtcctcgcctggagtggagccaatagcttcatcatttgcccaatcggtgacttccaatgcaaagtcatccgaaggttcgtctggtagcaaattcataaagtcttcacaaatagtagacacgtctgggtcggttggaattgaagcagaggccatggctgcaaaatatctgacaattgcgtgtttgcagttgcctgtatcttccgccaatgttgtagaatttataggctcacccaaccccgcaatgggcgtgtttagtcacatgattaatgcttctgggagttttcactttccccaaacaagcttacctgcaccctttgttcgtaatgcataaaaataaccactgctatagcaaatatgacgatataaaaacattttatagcaaggccggacattactgtagcgcaacatgttgtgcatataccacgtattccccccgtattgatatgatttaaatgattatccttggttggttttggtctaacataagatataagctctactatagcgagcgtgcatacaacaacccaggccagaatccgaatgtatgtggggtataataacgcgcatggtgtatatgcaacgccaagcgttaaaagcacaatacatccagatgatatatgagcgataacctccaaaagcatcaataacgtaacacctttatgcatatataaaaaacttatagggtcagcattaaatactttactcataccatcccgtcgcatggaaacatcacataacaaccttgccaactttgtatatgggtaaccaagaagaatgttcgaaataacccgtgttacgtaattcagtgaatatgatgtgggggatattaactcacaggatgatcggaatggcccaaacatacgacgtattcgtcgaaattgtaaatacataccatatacaaaccatgcaaaaaaaatcatttttagctgcacgcaccaaaaataagcgtgacaattacgtgttcccagaacaattcgaattttgtcatgcaaaggtgtagaaatagcggtttttaccatagtatctcctgataatagattttcccggcagctgtaatcgtatccagataggccatccaaaaacgttgagtggtttacaaacgttacatatataagagagttgttataagacccccatacaaccggtccaccattaatcaccgtggttgcatacacacactcatgttcaaactttacacgagcggtataccatagggtaaaaacagcatgtccgctaagtagacacataattataaaatgttctgtcttgattcctaaagcctgcatgacccgtggaagatggcaattcaagcacgatgtagtatcacacggttggtgttaactcgaagttaaatttggataattaggtacttctagagtaaagattgtatgcatgcgattgctatcgcactttgtagcaaaacattgttgtgcaagcgaaatacacaaacggttgtgatgatccactcgcagagacacaaatgtccggggagccgttcttcctccgcgatggggatatcgaagacaagtgaacccttttgttccgcatatgagctgaaataacacccagtcccttttgatggcgatacactttgatgatgttaaggtatattcgcgatcacgcccggggaaatgaacagcaatatgctccacaatagattctaatattgtgctgtcgacaaaggcctccagtgtaaatgcgtccagacaagttaccccgcgctcttttagagcctttgttaaagatatttgcggggagctaaatatttgtttattacgcgcaaccttacgttcaaaaaactctgcgtattcccccccaaggttatgtaaaataaattgcactggaacattcgactgcggtcttgaatgaaaatgaaagtttgccgggtttctatgtgatgtcacaaacgctaatatatcaatacactgctcaggtacaacataaaatgggagtagttgtccaaccgccgtccctgtggttgttactttggagaaaaaaggcagtcttaaactatgtccgtggctataaacaccagtatctataaacgaaaagtcccgtaaatacggaccaatatattcaacaaattcccgttccagcaacaccgcttgctgtaatatttgtgcaaacccctttaaagtggaagaccccactaacgcatagggatttgggattggtacgcataccctgaaacctattttctctttacagttacagggtagagtttcatgcaagttttcattgtttgatacatcggcgtgtgtatggacttcagacgttgtctgtgtatcaaaaaaccatacatcctctgtataattctcttctacacacgtgtataattcgccattttctatgtaaaaatcgatgtcagaatggctggttatatccaataaattatcatcatccaacacctcaacggtaggttcaggacatgcagttttataaaaataacatgggtctttgttagggtttaccacggcctttggaaaaagtaattgcatggccgttaaaataccatgacgaaatgctcgcatgccggcatgtaaaatacccaatgggatgggttttcttatatgaaagtctacatcaagtatgaggtttgtgattataagatttgtattaaatagctcattcctgtttatataaagctgatctttgggtatgtttgatgaaattttagaaacgtttttaacagacgtagataatagtaaagtcaactgcatatctcgtagtgaagcggcaacaaaattacatggattaatttgtttaaggtcctccgcaattaatcgagcctcgtgcggtaaagtgtaacggtttgttattgatgaccacgtatcattagcaataacagcaaatgcttgggcgccgtgaggcaaggctacccgatatacaggcattggtccagttacctcagaatggccgatgagggcttctaatggagttttataactcaggatggatacatcatgtgtggctatcccagtggcagcagagaaaaacagtaatagttttgtaatccccgggctcgtatcaaaaccagtacgaccactttggttaggtgtatcgtttgcaaagttggctgctcgtaacgcctccgcggaaacacccgaatcctcaaaattagacaattcgtcaaaaccgggtggatttgagggaatagtggaggaccatccatatggactaaattgtttttcaatgttttccacacgacgagttagcgttgtagctaggtcacatacgcctataaacttgctaggttttgcggcatacgtaagacttaaagtatatgttttagtaattgtatatttatgtccaatctcaggtccaagttcagtgacatcacaaattacgttcttttttatatagtcacgcatgttgagacgagaacgtacatgattaaaaaaattagcagtagctctttttcccaggttggatgattttaagaggaccggtttattcacaaaatctgagtatgtaaccgcttgtaggtggtctgcgatctgtttccgattgaaacattcaaaatgtgccagataaatataatcaacaaattcacggtctggaactttaaggccttttctatcgttggtaatatactccgatactgcgtgtatttccgttgtgtctgtatgtattcgctgtaaaatgtacgatagagcatttttggctgtcaaacctcgtgtatatgttgaggaacaacaaaacatggaaagtttatcaaaagacaacaagtccgaaatattgtacccactacaattaggtaatgccgggacttggtaagttaaaaacaaatctttaattgcctgtaagtcatataagggggtttccaacgtattgtaacttgtgtccgtttgtaacaagtaatagcgtgtagccaacactagcgttttttcagagggtccaaatcgaacaatataccaaaacggcgagcatccatacccccagtagagtcgtcgatatgcagccaatacttgacgttcgtaatgggcatataatgatgttagctcctgacgaccaacggattttttaactaacttgcagagtgttgcctctgtgatgcataggccgttgtccgataatccctttcggtttaaatggtgtgttgttaccatcagagtttgtataacttccgagtgaatgtcaaacgtctccgatatacatagggtatcagatattatatgcggatttaggggtgctccataccataacgccttatataaagctttaaaatcagtttgggttttaaaacaacaaaaaaatataggccagacccgggatcgtacatctccagttgaaaatccaccaattaaataaaaaataacgttgacgtccctactacaaaataaatgcattatttggttttcttcatcgttttcagttacttcacgtgggcgtttagttgggattacttgcgtgatctcttccctcccatttttgacaaagacgtcatctaagtcgggagtccaagtataactcaccacatacagaggttctgtgcttatctgcccggtaagcaacaacagcgagtgggagattgcacatccctttgtggcaaataataaccgaatcgtcggtttggaggatttatccatagttcaatacgttggaaagccagtcaatcatgcagacggtgtgtgccagcttatgtggatatgctcgaataccaactgaagagccatcttatgaagaggtgcgtgtaaacacgcacccccaaggagccgccctgctccgcctccaagaggctttaaccgctgtgaatggattattgcctgcacctctaacgttagaagacgtagtcgcttctgcagataatacccgtcgtttggtccgcgcccaggctttggcgcgaacttacgctgcatgttctcgtaacattgaatgtttaaaacagcaccattttactgaagataaccccggtcttaacgccgtggtccgttcacacatggaaaactcaaaacggcttgctgatatgtgtttagctgcaattacccatttgtatttatcggttggcgcggtggatgttactacggatgatattgtcgatcaaaccctgagaatgaccgctgaaagtgaagtggtcatgtctgatgttgttcttttggagaaaactcttggggtcgttgctaaacctcaggcatcgtttgatgtttcccacaaccatgaattatctatagctaaaggggaaaatgtgggtttaaaaacatcacctattaaatcggaggcgacacaattatctgaaattaaacccccacttatagaagtatcggataataacacatctaacctaacaaaaaaaacgtatccgacagaaactcttcagcccgtgttgaccccaaaacagacgcaagatgtacaacgcacaacccccgcgatcaagaaatcccatgttatgcttgtataaatattgaaataaaaactaaaaacgtttctggtgtatgtttttattttgtatataaaattaaaacattgctggctggcgtggttattacatttaatgttttagtagaaaatcgacatcgtttgtttctttatcagttgaaccaaatccacgcgttccccgttcgctgggtgtggctattagatctaacgttttagtaaaataccattgtacacccggtatgccacatttaccgcggatagcataaggaaatgcaatattacttaaaacgttgtgttttaagtgtatttgggtgttgtgatctattaacaggacctgtgcaagacgatctcccgtttttatacgtatgtcatcacccgtgagattatatacgtagaatttacagtgttctcctgcaggccatgccgttggacacacgataatgcctgatcggcttttcgatgatcttccaaaaatataagcgtttatactcggatgttgtaagtcccagtctcttataatcggtaagacaatttttataaattcattcctttttaaatataggttatatggtacacaaatatcatatcccgcgtcttcttggcgttttggattgatgatatgtttgtaggttaagggaacatcgatatggtattctgcagaatccctatgtaaaggttgcccctgctgtaccgtggaaatatcagcaaattcaggtataacgggtttttcataatttgacggcgagtttgataagggttgaacttgtatcgatttaaaaattggatccagatgtttaagaacgttttttgggagaaggcgactttgtcttaattttaccgggaacaagtagattgttaaatgtccgggtaaaataacggttactcctggccggtaatacaaaagggctgaaattactcctctgtaacccgcatcaataactccgttggcgacaaaaaaattgtcttcatcagcaagggcagtatctttgcattgaattaacaacagtgcgtattcattgggaggcgccgacttaaccaacagctccaactgctgcatataaaaaccgccccgtgttacagatttttcagatggcagttcgagtttcttgtggttccggagtaacaacggttgatgtcgacttactttatcgtctaacacgcattgcagcgtatctgcacattcaggttgaacttctattaaaattgtatcttttaaacaccgattcggaatagtttggctacaaaacatatcacctgtatttactgccgtttccaagatgggatcaattaccgcttcgttcatattaataacgatgcaaattttatttttttgtgaagacagcagtggggagccaaactttgcagaacggaatttttggcatgccagctgttcggctcgtggagtttatatcgacggatcaatgatcaccacccttttcttctacgcatcccttttgggggtgtgtgtagcccttatttcgttagcttatcatgcgtgtttccggttatttactcgttctgtattacgcagcacgtggtaaacccgtttgcctataaaaggggcaggcgtgtataagagggcccctgtttaatacgcggtctgccgtgtttggatatttcacgaccctatcgtttatttacgtaatggcatcttccgacggtgacagactttgtcgctctaatgcagtgcgtcgtaaaacaacgcctagttattccggacaatatcgaaccgcgcggcgaagtgtggtcgtaggaccccccgatgattcagacgactcgttgggttacattaccacagttggggccgattctccttctccagtgtacgcggatctttattttgaacataaaaatacgacccctcgcgtacatcaaccaaacgactccagcggatcggaagatgactttgaagacatcgatgaagtagtggccgcctttcgggaggcccgtttgagacatgaactggttgaagatgctgtatatgaaaacccgctaagtgtagaaaaaccatctagatcttttactaaaaatgcggcggttaaacctaaattagaggattcaccgaagcgagctcccccgggagcaggcgcaattgccagcgggagaccaatttccttcagcactgcaccaaaaaccgcaacaagctcgtggtgcggtcctacgccatcatataacaaacgcgtcttttgtgaagcggtccggcgcgtagccgccatgcaggcacaaaaggctgccgaagcggcttggaatagtaatcccccaaggaataacgccgaattagaccgtttgttaaccggagccgttattcgtattacggtgcatgagggtttaaatttaatacaagccgctaatgaagcagacctaggtgaaggagcatcggtatccaaacgtggacataatcgaaaaactggagatttacaggggggcatgggtaatgaacctatgtacgcacaagttcgtaagccaaaaagtcgaacggatacacaaacgactgggcgtataactaatcgaagtagggcccgttctgcatcaagaactgatacgcgaaaatagggatataattacgcagtaacggtttacccggtattatgtataataaataaacgtataaaagacagtcgtggtttgtgtttattataaatgtgtattatatgtcacatattataaactgtttaaatagtaccacgtggtattatgaacagtttataatcagttgctaccaaacaaaccccattagacggcgggttttgataaagggaatcgcttatttaaactaaagattttactctataagtatggagtgtaatttaggaaccgaacatcctagtacagatacgtggaatcgtagtaaaacggaacaagcggttgtggacgcatttgatgaatcgttgtttggtgatgtagcatcggatattggatttgaaacgtcgttatattcacatgcagttaaaactgctccgtctccgccttgggtagctagccctaaaattttatatcaacagttaatacgggatcttgatttttcagaagggccgcgtttactatcatgtcttgaaacctggaacgaggatttattctcatgttttcctattaatgaggacctatattccgatatgatggttttatccccggatccagatgacgttatctcaaccgtttcaaccaaagaccatgttgaaatgtttaatttaacaacccggggttccgttcgattgcctagtccaccaaagcaaccgacggggcttccagcttacgttcaggaggtccaggattcgtttaccgtagaactacgcgcccgggaagaagcatacacaaaactactagttacttattgtaaatcgattatacgttatctccaaggaacggcgaaaaggacgacaataggtcttaatatacaaaaccctgaccagaaagcttacacgcaactcaggcaaagtattctacttagatattatcgtgaggtggcaagtttggcgcgtcttctgtacctacatttatatttaaccgtaacgcgtgaattttcctggcgtttgtacgccagtcaatctgcacacccggacgtgtttgcggctttaaaattcacctggaccgaacgtcgacagttcacgtgtgcgtttcatcctgtattatgcaaccacggcattgtgttattagaagggaaaccactaacagcgtctgccttgagggaaataaattaccgccgccgagaactgggactgcctctagttagatgtggtcttgttgaagaaaacaaatctccgttggttcaacaaccctcattttcggttcatttaccacggtcggtgggttttcttacccaccacattaagcgtaagttagacgcatatgcggtcaaacatcctcaagaaccgagacatgtacgagcggatcatccttacgcaaaagttgttgaaaatagaaactacggtagtagcatcgaagctatgattttagcacctccgtccccatccgagatcctgccgggggacccaccacgcccacccacgtgtgggtttttaacgcgttaaacgtcattggggtagagggtgtaaataaattacgaaaacgtgcatgcgttttttatttttacaatgcgccgtatatggtatgtctgtcatgtgctctaaagtcccatatataaaagaagccccaacgagtgtatgcgtattgcgtaccgcgaccctgggatgttttacaggcgcgtttgtttgtctcggttataagtatgcagtcgggtcattataaccggaggcaatcccgccgacagcggatatcgtctaataccacagactccccccgtcacacacacggaacacgttatcggtcaaccaattggtatacacacccaccccagatattgtccaattcagaaacattagttgcggttcaagaactactgaactccgagatggatcaggacagcagttctgacgcatcggatgattttccgggatacgccttacatcattctacatataatggatccgaacaaaatacatcaacttccagacatgaaaatcgcatatttaaattaacggagagggaagctaatgaggaaatcaacatcaatacggacgcgatcgacgacgagggagaggcggaggagggagaggcggaggaggacgcgatcgacgacgagggagaggcggaggagggagaggcggaggaggacgcgattgacgacgagggagaggcggaggagggagaggcggaggaggacgcgattgacgacgagggagaggcggaggagggagaggcggaggagggagaggcggaggagggagaggcggaggaggacgcgatcgacgacgagggagaggcggaggaggacgcggcggaggaggacgcgatcgacgacgagggagaggcggaggaggattatttttctgtaagtcaagtttgcagtcgagacgcggatgaggtttattttacgttagacccggaaataagttacagtaccgatcttcgcattgcaaaggttatggagcctgcggtatcaaaggaacttaatgtatcaaaacgttgtgttgaacctgttaccctaacaggctctatgttagcgcataatgggtttgatgagtcctggtttgctatgcgcgaatgtacccgtcgcgaatatattacggtccaaggattatacgacccaattcatttacggtatcagtttgatacttcccggatgacacccccacagattttgagaactataccagcccttcctaacatgacacttggtgaacttttattgatttttcctattgaatttatggcccagccaatttctatagaacgtattttagttgaagatgtatttttagataggcgggcttccagtaaaacacataaatacggcccgcgttggaattccgtctacgcacttccatataatgcgggtaaaatgtatgtacaacacattcctgggttttatgacgtgtccttacgtgctgtgggccaaggaacggccatttggcatcacatgatattatccacagcagcatgcgctatttctaatcgcatttcacatggagatggattaggatttttgttagacgcggcaattcgtattagcgcaaactgtatttttttgggacgtaacgataattttggcgtgggggatccatgttggttagaagaccatcttgccggattaccacgagaagccgtacccgacgtactccaagtgacacagttggttttgccaaatcggggtccaacggttgccattatgcgtggtttttttggggcgttggcatattggcccgaactaagaattgctataagtgaaccatctacatctttggtgcgatatgctaccggtcacatggaacttgccgaatggtttttattttcacgtacacatagtttaaagccacaatttaccccaacggaacgggaaatgttagcgtcattttttacgttgtatgttactcttggtggaggaatgttgaactggatctgtagagcaactgcaatgtatttagctgctccttaccattcccgttcggcttacatcgcggtctgtgaatctctgccctattactatatcccggttaatagtgacctgttatgtgatttagaggtattactgttaggcgaggtcgacctcccaactgtttgtgaatcctacgcaactattgcacacgaattaaccggatatgaggctgttcgcacagcagccacaaattttatgatagagtttgccgattgttataaggaaagtgagaccgatttaatggtaagcgcgtacctgggggccgttttattgttacaacgggtgttgggtcatgcaaatcttcttttgttgcttctctccggtgctgcgttgtacggaggatgttcaatttacatcccccgaggtattttagatgcatataatactttaatgttggcagcaagtcctctttacgctcaccaaactttaacatccttttggaaagaccgcgatgatgcaatgcaaactttggggattcgaccgacaacggacgttttacccaaagagcaagacaggatagttcaggcatcacctatagagatgaacttccgttttgtgggattggagaccatctatccccgagaacagcccattccctccgtggacctagccgaaaatcttatgcaatacaggaatgaaattctgggtttggattggaaaagcgtagccatgcatttactacgaaaatattaagggttgtgatttttttcattaggatgaaaagaacgtttcctagccacacccacaaaggagtttgtaaaataaaatctctgtttagaccttaaaatttgttgtgtgtgttgtgtggggggtccgtgaggatcgacctttacaagatataatttgtccatatcgcaatgttttctcggtttgcgcgttccttttccagcgatgatagaacgcgtaaatcttatgatggtagttaccaaagttttaatgccggcgaacgtgatttgcccacacctacccgggactggtgttctatttcccaacgcataaccagcgagcgcgtgagggatggatgtcttattccaacgcccggcgaggctttggagacggcggtaaaggctttatctgaaaagaccgacagcctaacatcgccggttttacaaagtaccgaaagacacagtgttctgcttggattacaccataataatgttcctgaatcgttggtggtctcgtgtatgtctaacgatgttcatgacgggtttatgcagcgttatatggaaacaattcaaagatgtttggatgacctgaaactttctggggatggactttggtgggtttatgaaaatacatattggcagtatctcaaatacaccacaggagccgaggtaccggtgacttcagagaaggtaaataaaaagtctaaatccacggttttgttgttttcatccgtagttgccaataaaccaatatccagacatccttttaaatctaaagttataaattcggattaccggggaatatgtcaggagctacgtgaggcgttaggagctgtgcaaaagtatatgtattttatgcgtccagatgatcctacaaaccccagcccggatacaagaatacgtgtacaagaaattgcggcttacacggctactggctacgggtggatgttatggttcttggacgttgtggacgccagggtatgtcgccatctcaaacttcaatttcgacggattcgagggccgcgcgcgtctgttattccagatgatttgcttagacgacatttaaaaacgggtcctgcggtctcagcgggcacaggagttgcgtttattttagcagcaacaactgccagcgctcttactgcgcttttgcgtattagtgtattatggcgaaaggaagagtggcgggatggtttaaatggaaccgcagctgcaattgttgcggcggttgaacttattacgcttttgcaccaccattttcaatacttaattaatatgatgcttattggatatgcatgttggggggatgggggattaaacgatccttatatattaaaggcgctacgtgcccagggacggtttttatattttgcgggtcagttggtcagaacaatgtcaacacacagttgggttgtgttagagaccagcacccatatgtggttttcccgggccgtggcgcagagtattttagcacatgggggtaaacccacaaagtattatgctcaggttcttgccgccagtaaacggtatactccgttacatttaagacgtatatccgaaccatcgagtgtgtctgatcagccgtatattcgttttaatcgactgggatctccaatagggacaggtatagggaatttggaatgtgtctgtttaacgggaaattatttatctgacgacgtaaatgcaagttcgcatgtaattaatacagaagcaccgttaaacagtatagcacccgatacaaatagacagcggacttctcgcgttttagttcgtccagacacgggtttggatgtaactgtccgaaaaaaccactgtctggacataggccatacggacggtagtccagttgacccaacgtatcctgatcattacacccggataaaggcggaatatgaaggtccggttcgggatgaatcaaacacaatgtttgaccaaagatcggatttacgtcacatagaaacccaagcatctttaaatgatcacgtatatgaaaatataccacccaaggaagtgggttttaactcatcttcagacctggatgtggatagccttaacgggtacacctccggagacatgcatacagacgatgacttatcaccagattttatacccaacgacgttcccgttagatgtaaaaccacggttacgtttaggaaaaatacgcctaagagtcatcattaagtacagcggttaatagatagttatggactaggcactttggcggtcatttccacaaccaggttaaaattgggggatttgggagaaaatagtctattgcgtattttctgttcaataattggactgcgttatttaaaggtctgattggttgattgggttataaaaggaattactcctttaaattttacttaatgtacccacaatatcaagtggtcgtttgtatttaacgattattaccggtaccatgggagacttgtcatgttggacaaaggtgccgggttttacgttaaccggcgaacttcagtacttaaaacaagtggatgatattttaaggtatggagttcggaaacgcgatcgaacaggaatcggaacgttatctttatttggaatgcaagctcgatacaatttgcgaaatgaatttcctcttttaactacaaagcgtgttttttggagggccgtcgtggaagagttgttatggtttatccgcgggtcaaccgattccaaagaactcgccgctaaagatatacacatatgggatatatacggatcgagcaaatttctaaataggaatggcttccataaaagacacacgggggaccttggccccatttacggcttccagtggagacattttggagcggaatataaagactgtcaatcaaactatttacagcaaggaatcgatcagctgcaaactgttatagatacaattaaaacaaacccagaaagccgacgaatgattatatcgtcttggaatccaaaggatatccccttaatggtactacctccatgtcacacgttatgtcagttttacgttgcaaacggtgaattatcctgccaagtataccagagatcgggggatatgggccttggggtaccgttcaacattgctggatatgcacttcttacctacatagtagcgcatgttacaggacttaaaaccggagatttaattcatacaatgggggatgcacatatttacttgaatcatatagatgctttaaaagtgcagctagctcgatccccaaaaccttttccttgccttaaaattattcgaaatgtaacagatataaacgactttaaatgggacgattttcagcttgatggatataatccacacccccccctaaaaatggaaatggctctttaatggatttttaaatgttgtcaagacagtagatgtgttgcgaatgtaataaaatgatatacacagacgcgtttggttggtttctgtttatgaacagcaacggatgcatagggttgcgataactgcgataagacccaatgtcccaaggatagatatcacaccaattataactgctacaacggaaaatgtagtggcgtaggtagatgcatcgtaggtataaacggccgaaaacggagggaattttttagggtaaccatctagatgacacgaataggtgataggtccgtcgagttccgatgttggacaagaactttgcatgtttacaaaccgtttgttttgatcacacaccccagtaatctcactgttttcgtggttaatgggagaatcgttaacccaccatacgaaatgtacaacgccacgtggcacacattttgccgtacatactatgtgtccatcaataatacctatagacacgttgggaaatggatagacgtcaggggtaacgacagcagaatatttcatattagagacgccatcccgaatccataaaacattacattggatggctgggggtgggtaatccatttgtttttgctgtggaattcgtaccgccgaaacataactaaataatccattggcatattcttgtattgcatcggttataaaattttttccgatgttaccaaaccttgaagtccaccgaacacgtaccgagtgcggtggataatactttgatacgttacagtaggctgcgtatgtctgtccggttaagactggatcgccgacaacggtaatatttggacgataatacgttgtaactgtaatactgtgttccgatatgacgttcttagtttttgtattaacgactcgccaaatatacgttccctccgtggtagcatccatagataaaattgttacagaaaaatcagacgttgttttaacatctggtattacataattttccttagcgtgtgtaaatatctcagggttgtttattaagtttaaatcggcactgttgctatataacataaccggtaaatctggcatgcgtattaacgcattgcccagttgacggtgcggatctataaggtgacgcgtaaaccaaacttcaatatgaagatcggggcgtataagcgacttccaccttgttatatttgaaccttccggatctaaagaatattgttcatatgttttttgttgctgcttaaaggccgcctgttgtccggtcgttagacgcatgtaacaaggcatgataaatgtgtgaaaatagggtatggattgtattccgccgtgaacgcattgtatattttcatatagaaaaggtggttgtgaatgttgggtgttggctgcgggatcgggctttcgggaagcggccgaggtgggcgcgacggcgggatcgggctttcgggtagcggccgaggtgggcgcgacggcgggatcgggctttcgggaagcggccgaggtgggcgcgacggcgggatcgggctttcgggtagcggccgaggtgggcgcgacggcgggatcgggctttcgggaagcggccgaggtgggcgcgacggcgggatcgggctttcgggaagcggccgaggtgggcgcgacggcgggatcgggctttcgggaagcggccgaggtgggcgcgacggcgggatcgggctttcgggtagcggccgaggtatataattcagttatacttacgggtgtgggttgagattcagtcgataattgtatacacgcgatcgttaaaattaaatttatttgtatccgcttcatcctggtttttattgacacatccacgctccccttaaataaaagattaaaacacccaccgcggaatttaaatgatggaaacgtttttttcgacattgggaataataaaaacggcttttgcaactttaaaaactttatttatctcgattacgatacatatgtaccacatagatagcatagatttattataatataaacacacacgtgatatactttagtgatatgagatgccataaaacagtcaataggtttaacgcttagtctcatcatctgaatacacgtcaaacccgccgcaactgttgatgttagaattataatagctccccatgaaatgccggcaaatgttacagctatacccgtcaccgaggtcgttgtatataatacaattacccataggttttttttttcttgatataaaacggcaaaaccctgtaacccaaatgctataatatgacctcctattgaaactgctaacgttacttgtgtaagtttgataaaatgatttaatttaattatatgtgagattgcccacattaatggggtaactatatataacaccgggggtataacagacattatacgaattcctttaaacacgcgtttaagggtccgggaactttctcgatggtcacatactctcccgcggtcattttgtgtatatacaacggcaaaacctaaatctgtataagtgtttaattgcttatggcgatttttacgatatatacacgtatcttgcaaatcggtggcggcatcgacaattgaaactagtgtgacaatagatatacacaatccaataagaacctcatatttactgacatacatatataaaataacggttagtaaacctcccaacccagttcccaacatcataacataaaaataaatatgcggtccattgaatgtcgtaacaaagttgtagtaatggatatgcacagcagccactgttccggtaatcgcggatatggaaattcccagtaattctacaaatggaagatcccgggatattgggcaaccaaccgcccataacacagcaaaacccaacacgaccaccgtctgcaaacatcgtcccaattttgctaatgtgcgtagaaatttcacggatgttggccataaccccgaaacgacgatcaaccccataatagttgcattgacggcagcttcgcagacgtgatattgtaaaattaacccggacgtgataacgcttgcttgtagtcccacgagaaacaaccgcgatgctgaggttattgcacacgaattacattcttgagggtttccgacacatccttggattgattgagcgcggattaattctctgtctaacacacccaggttttcatcatggacagctctttcaccattcacggccatgtcttaagtttaataattcaaaacaaataaaaatgtgttcatctatggtacacacaagtttgtatgtaaaatataagcaaaagttgcacttatttaactgtacatattacgtcagattcacgtgataattcagaataatccagggttcctgcagggtccactggaggagccacacaatattcgcgaattccgattccctcctgccatgtggtttcggggagtttcccccccattttatttccggtatttttttcgtttctttttgttaataaattgcgtcttttttttaatggtggttcatccttcacagattccatgttcgcaaataattgcatcgaggttaatttttctttaaggtctttgggacttaagaacgttgcataaaaaaaagaatgcacgggtgcggaacgttggatatacaatccaaccatgggggagttagttaaggcgagataaaaattaatataacacgtctcatcccgtgttaacttaagattttgtacggcagaacggaatccactgtgtgtttccaataatactccaaattcacgcatactcccgctgccataaacaacattattaaggatcctttttgaatttgtgattgagcgtattaaattatatggtgtaggcttgcttccgtttatatccaaggaaacattaaatgagataaaaccacccccggcggtctggatgtacatatccgtggctgttagaatgaagcatgttgtaaacccaaaagttttaagtagtcgctgtaaacgggtgaattgatcgcgttttaagcaaatgcttatatctggagttagatttggaaacatcattgtataacaagcgagttcacgttttacaacttgtttgtaacattgtacttgatcatctggaccacaatcacccgggcgttgccataccatcgtttggataatactccgctcggggggttgtccggtaaatttaaaatataaccgtgttggggtcgacggatcttttgtatggcgaaacgcgtcaataagcgaggaccgtccctccgttgccgcgagtacaaccattctcggcccagtccaattatactggtcaaacatatttgccggtataggaatatacagttgttctgtttccaaactacagtgaataattaatccttcgtcgctgaatattaaaatagaatcccttagtctattaaccagaggtgatatagacgaaattaaaccagtaagcgttttttccgttaaaacagctctggcgatttctggggcgtcaaaacccgcatgcaattccatgtccaaagcatcgtctgtacgcgacctcaaatccataatttactacttaaaatgtttactatagaaaaagtaatcatatgtaaacacacgagtttcgttaatatgtttgtttaacccgatccggtgacttaagtacataaacaggcatgatatttgaatagtacggcccatgggagggaacatttccacgtgttccaatacagggggtgttccttaatagggactgtgcaataaaatacgtaagaagttaccagatttgatgtaatgtttgtcataaaaaatatgtacatcattatatacgtctgtaattaacacaagatcacatcgaagaattactgaagccgctgtgaaacctttcacaagacgatataaacttggttaagtgtattgatggggctctttggactgacacgctttatccatgaacataaactggttaaacccagcatcatttcaacgccacccggagttttaacccccgtggcggtagacgtatggaacgtcatgtacacattgttggaacgtttataccctgtgggtaaacgcgagaatttacacggaccatctgtaacgatacattgtcttggagtcttattgcggctattaacacaacggtcatactatccgatatttgtattggaacgttgtacagacggcccattatcacgtggagccaaggcaattatgtcacgggccatgaaccacgatgaaaggggaacctcggacttaacccgtgttctactatcatccaacacatcatgttctatcaagtataacaaaacatcggaaacatatgacagtgtgtttcgaaactcttccacgagttgtattcctagcgaagaaaacaaatcccaggatatgtttttggacggttgtccacgacaaactgacaagacgatctgcctgcgcgaccaaaacgtatgcagtcttacctctacaatgccatcccgaggacatcctaaccatcgattatatcacaaattgtgtgcaagtcttattagatggatggggtatgcatacgtcgaggcggttgacattgaggcggacgaggcatgtgcaaacttatttcatacgcgtacagtggctttggtttatacgacagatactgatttactcttcatgggctgtgatattttgttagatgcaattcctatgtttgctccagtagtacgatgtcgcgatttgcttcaatatttaggaattacataccctgaatttttggttgcctttgttcgctgtcagaccgatttgcatacaagtgacaacctaaaatctgttcagcaagttattcaggataccggcctgaaagttccacatcaaatggacacttcaacgcgctcccccacttacgactcgtggagacatggcgaggttttcaaaagtcttaccgtagccacgtcgggtaaaacagaaaacggagtgtccgtttccaaatatgcatctaaccgatcggaggtgacagtagacgccagttgggctttaaaccttctgccaccctcatcctccccattggataatttggaacgcgcatttgttgaacatataatcgccgtggtaactccattgacccgcggtcgcctaaagttaatgaaacgtgtaaatattatgcaaaatacggcagacccatatatggttattaacaccttatatcataacttaaagggggaaaaaatggctcgccaatacgcacgtatttttaaacagtttattcctactccactcccactaaacactgtattaacaaaatattggaattaaaacacacataagagcgacttaatggttcattgttttattttgctcgtatatacatgttataaatcgtttatcactgtgcccgcataagatgtactgtgtctctcaaaaaaatttgtgtttttatctgcaatcataaatgcaagtggaaagtccgaatcgggaggtggggtgttaaatagttttggtacattaatcgctgataaaagcctgtccgcgctgaatttcacgtattgtgtaattgcatcgacgttcaccaaacgggttttgggtgcatgggattttaaaaacgcacactcgatttcaacggcttccgaaaacagttgatgtattctggtgatagcgggtttttcgggtacatagttattgtatatacaacacgatgcgctggtatgtatggcttcatctcggcttataaggtcgttaaattgacaagttacaacaaatagtccgttattgcgtaaatatgcaatagccgcgaacgatgatacaaaaaaaatgccctctataagaatcattagtatatatttttctgcaacggatgggttgtcccgtaccttttcttccaaccattgtactttttgttggatcgacggattattaatagtgacatttacgtattgtacccgcaacgattcatcccctctgaacaacattagttgaatttgactatagacacgcgcgtggacaacctcgatgcactcttgttcaatgtagtaatggtgaatatccttttgggaaaagagttgggttagagagcccaaattaacatttaccagatcatctgccgccgataaaaatgtaaaaataaatctgtagaatattagttcatcttccgttaaacagtccaagtattgataatcatcttcaatgataaaatcgctttctaaccaacgattcgaaatgctcagggcacgtaaattgtttatatctggacactccggcctgtaaaaaaaatgactgcaatctttctgatccattttggaatagtttcccgtgtaaatttataaagcacaactggtacaggttaattcgcctcccgcaaacagtccgctgttcgtagctttacgaattttacagtagtacatacccgttttaaggccggctttataggcacgtataagcaaattcattattttggaggcgggaattgtcccgtctgggcgttcctcaataaataaagtcattgattgactttggtcaataaatggcgccctttctgcacacatatcaacgagatcctcttgctcatattcaaacgctgttttatattttaagagtgggtgactattagataaacagccaaacgaacgtattactgaccattggtttttctcaagtatgtttataacttccagtcgtttttcttcacatgaatacatatctcttagttcgtccataaggtctaagttgggtctaagtaactcacccgaggtggtgaccttactaaacatattattataaattggagagaaaccctcactgcactccgttacctgtgcagatgaaactgtgggcattaacgctaagaactgcgagttgtataacccataagcgcaaatatcatctcgcagggtacaccatggtaaatctaaataacttatcgtagaaaacccatcttggtgtaaccatcccttagcatatttactttcggtaaaacccttaaacggggctaagccgccaatcttacacatttccatgcttgttttcattgtctcatacaacattaactccgctatttgtacatttaaccgtctagctggttgggaagttaaatcaaatcctaagcggagacaagttgtatgtaacccttgtatgccaatgccaagtgatcggttgttttttacacctttacatgattttttacatggaaagttcccagccgccaggaccccgtttaaaaaaataacagtcgttcttgctgtcaattgaaggtcgtttaaattaaatgacactgggcctttggataagcacgttgtaagatttatgctggcaagattacatacgccatgttgatgagcgtctgccttttgaacaatttccgtacacaaatttgaccccgtgatagcatttccttgggtattcatatgataattacgattacaggcatctttgaacattaaaaaggggcttcctgttacagcagcactgcgtatgattgtgaatgcgatatcttgaatgggaacagaagaaacgcctaatccttctctctctaaacgtaaataggttgaagtgaatgcctccccgtgtaatgttcgaaggatatcggctctgttatcaaaaagagtccactgaacattactagccccttttagatagcttaggtatctttcaaaaaataaatctggggtccataaacaacaaaatatgttatcacatcgaaatatttcatcacgaaccaacattccacgtgtggccaaaacagtttgtagatcgacgtgccatggttctatgtaaacacaaactccagttggtcgttcacaatcactgttaattgccataaccatgcaatctaaaagttttaaaactgcaagaagacctttcgtttgattttccgtaggtattaaattcagactctgtagagaaattcccactccacctcgactttgtaataccgttcccacatcgcctgtgatagctcgaacagctctcccaacagtgatggattccgggtccattaaataacaactggccgttgccccggtctctcgacctaaaaacatcataaccggtgtagccgggacaattttctgacatgccaacgctgtgaaaaatacccgacagacatcagtccatgtataaccatcatttattccgggaataagagttgcgattttaggcaggtttacgatttctgttgtcacggtggccgccagtcttaaaaagaattggcaaagcgactctaatttaccttcctctaacttagttaaataaaagtcttcgtactttaaagcagactgtagtccaagggtagctaaagcggggtattgatctttcaaaaacggttctaatatagcccgacgaatttcgtccctccgcccttcaattgcttggcggactcggggagttaaacagagaattggggaagtcaaccacgtttccatggaaacggatcgtaggttaatacggcaatggataagttctccacaacatcggtacactcgctcatcttgtcgcgtcaccgccttaagttttgagacgatagtgctaatatactccattaattccaccggtgtggttgattcgggcggaatgatgtattccttgtagccatgttgacataatcggtttataatgtcatgaaccgtattaaaaattcttttgaactccataacggataacgtatttaggctccggaataaacctttaaaccctaaactcacagctgagttagttctacaatattgtagactcccttatatatggttacgtacagcctgcccctccccagtatataatatcacgcaaaacccacgctatgttaaattcagtttattttacatacatgctttaataataacattcgttccatgtatttgtacccccccacacaaccccctctaaccaaatagttggcacgttataacctccgaaccgttccatgcgtcttgtataacgcacagactctgatggaattgttccaattaacgtatatgccgcatacatgcaggataattgtgtgggaagtccccgaaaatcgccggtccattgatacaatcgctgtctagccaagttccaatttactcctgtaatttcgccaatactacatcgagggcttgtcgggtcattggataactgcacaagcggcaacgcccttgtgttatatggctggtgggtatttgcaaccccttcagtcccccaggcggcattttcagctcgtatgcgtcctaacaggaagccaataccacgaccaaaacattgttcgtttagttggcttaatgcaagatgcagtcttacaccttctcgttggcgtcgctgtgtatatacaaaaaccaagaacacatgcttcagtccgtccgcggaaagatgtaaatctttgtcaacgtcccaaaatacgcaggccgggatgttggctgtgaccctgcgagttgaagttttgtctgtacgtgcagcttcttggggacctttggccacggcggttatattgcataaattatcctgaatggtatattccagcagggacccaaaaaaacttataaatcgatgtggaaatacatgacattgtaccatcgcacgtaaacactccgaaaaccttatgagccgcgtttccatacgactgcatccataggcagaaacaattgctgttctgttggcatccgctgcctgtttatccgtatattcttctgcccggcatgcggcgatgaaacttaatgacgttacatatgctctaagccccccaccttctccaacggtccaaggagccgtgcaggcattgaataggtttcgtaaaccctctagtagtacatcggggtcacgtccagcctgtgtaagtgtattagcttctccaatcatgtcagatggatgacgaaggattaagacgattgacccagcatgctcaatgtccggacgaaaaaaatcggttaatgacacttgttggattagctgtgtcgttgatttaaaattatttaacgggagtctaatggtaacttgcgggttaccaattgaagttggatttatttgaatgttgttcatacgattaataacaattgaacggggggttacttgaatagacgcggtttctgtacgttttggtggtacatgtatcggttgtttgttcagacctccaaagcgagggccaattgttaaatcgcgactccaatttccgaagaagcccggagcataagtcatatgaagcccgttccctatttgaataaaacggttatttcctaaaagactgatattagttccacatagcgtttgttcgtttaaagtaaaatgcgagttggttggttgactccccatagctgaggggttaaattcacacaatgcaatcgtgacgtggtactatctgaaatgttgcctggggtatgtgtacacattatacagtcgtagtaccgtttatataatgttaggtaggaggagcctataaaaatattttgattggcgttaaaaggttcttcaacttaccgtgacgtcctttttattaacatgcgtttttattgatgttacatttatgtcttttcattccggacggatgtagctttttcatatcacgttataaagttaagtcagcgtagaatataccatggaagaaccaatttgttatgatacacaaaaacttttggatgatttaagtaacttgaaagtacaagaagcggacaacgaaagaccatggtcaccagagaaaacagaaatcgccagagttaaggtagttaagtttttacgatctacccagaaaattccagctaaacattttattcagatatgggaacccctgcattctaatatctgttttgtatattccaatacatttttggcggaggctgctttcacggccgaaaatttacccggactgttgttttggagactagatctagactggacgatagaggagccaggtaatagcttaaaaattttaacccagctatcaagtgtagtacaagattccgagacgttacatcgtttatcggccaataaattacgaacctcgtctaaatttggacccgtttcgatacacttcattataacggactggataaatatgtacgaggtcgccttaaaggatgcaacaacagccattgaatcaccattcactcacgctcgtattggaatgttggaaagcgccattgcagctttaacacaacataaatttgcgatcatttacgatatgccatttgttcaagaggggattcgtgttttaacacaatatgcaggatggcttcttccgtttaatgttatgtggaatcagattcaaaatagctcactcactcctctaacacgagccctttttataatctgtatgattgatgaatatctcacggaaacgccagtacatagcatatcagaattatttgcagatactgtaaatttaattaaagatgaggcgttcgtatccatcgaagaagcggtaacgaatccacgaacggtgcacgagtcacgaatttcctcagctctggcttatcgagacccttatgtttttgagacatccccgggaatgcttgctaggagacttagattagacaatggtatatgggaaagcaacctcttatcgttgtccacccccggaattcatattgaggcgctgttacatttactaaactccgacccggaagcggaaaccacatctggaagtaatgtagcagaacacacccgtggcatttgggaaaaggttcaggctagtacatcgcctagtatgttaataagcacccttgccgaatccgggtttacaagattttcatgcaaattgctacgtcggtttattgctcaccacacactcgccggttttattcacggaagcgttgtagcagacgagcatattacagatttccaacaaacactaggatgtctcgctttagtgggtggactggcataccaattagtggaaacgtacgctcctactaccgagtatgtgttaacatatacacggacagtaaacgagaccgaaaaacggtatgaaacgctattacccgccttaggattaccaccgggaggcctgggacaaattatgcggcgctgttttgctccacgaccccttattgaaagtatacaagcgacacgcgtaatactacttaatgaaatttcacatgcagaagctagagagacaacatattttaagcaaacacataatcaatcctcaggtgcgttattaccacaagcaggacaaagtgccgtacgcgaagccgtactaacctggtttgacctacgtatggattcaagatggggtattactcccccggtggatgtgggtatgacacctcctatttgtgttgatccaccggctacagggttggaagctgtcatgataacagaagcactaaagattgcatatcctaccgaatataatcgctctagcgtgtttgtggaaccgtcgtttgtgccttatattattgcaacaagcacgcttgatgccctttcggcaacaatagctttgtcttttgatacacggggaatacagcaagccttgtctattcttcagtgggctcgcgattatggatccggaaccgtgcccaatgcagatggatatcgcacaaaactatctgctcttataacaatattagaaccttttacccgtacacaccccccagtacttttaccatctcacgtttctactatagattcccttatatgcgaacttcatcggactgttggcattgccgttgacctgcttccccagcacgtccgtcctttggttcctgaccgtccttctattacaaatagcgtttttttagcaactctctattatgatgaactttacggtcgttggacccgactggataaaacatcgcaggcgttggttgaaaattttacatccaacgcgttagtggtttctcggtacatgttaatgttacaaaaattttttgcgtgtcgtttttatccaacgccagatcttcaggctgttggtatctgtaacccaaaggttgaacgcgatgaacaatttggggtatggcgtttaaacgatcttgctgatgcggttggtcatattgttgggacaatacaaggaatccgaacgcaaatgagagtgggaatatccagcctgcgcacaattatggccgatgcttcctcagcccttagggaatgtgaaaatttaatgactaaaacctccacttctgctattgggcctcttttttcaacgatggcttcccggtatgcacggtttacacaggatcaaatggacattttaatgcgtgttgacaaactaacaacaggagaaaatatacccggtcttgcaaatgtagagatttttttaaataggtgggaacgaatagcaacagcttgtaggcatgccacggcagtcccgtcggccgaatctattgcaaccgtgtgtaatgaattgaggcgcggtttaaaaaatatacaagaggatcgtgtaaatgccccaacctcatatatgagtcacgcccgaaatctggaagatcacaaggcagcagtttcattcgttatggactccaggcaacagtttattgtggattctggacctcagatgggcgcggttttaacttcacaatgtaatataggaacatgggagaatgtaaatgcaacgtttttacatgataatgttaaaataacgacaacggtcagagacgtaatttcagaggctccgacgctgataataggacaaagatggcttcgtccagatgagattttatctaatgtagatttgcgtcttggcgtacccgggaatacaagtgggagtgacccttaatataaaacaggcgtgtttatgtacattaaagtatttgtggtttttattgactgggcgtttcgtttgtataacgctgttgttgctagtattttcataacctcctaggtttttggagctacacgtgcttattcaacgctctttgggatttgaatcatcgtaaacgtagcgtccctaccagttgagcgcgtaattttcgtaagcaataaaatggatataattccgcctatagctgtcactgttgcgggagtgggaagccgtaatcaatttgacggtgccctgggaccggcgtcaggtctgtcatgtttaagaacatctttatcgtttttgcatatgacatatgcgcatggaattaatgcaaccctgtcatcagacatgattgatggatgtttacaagagggtgcagcatggactacggatctgtctaatatggggaggggtgtcccagatatgtgtgctcttgttgatctccccaatcgaatttcatatattaaactgggggacactaccagtacgtgctgcgttttgtctagaatatacggcgatagccatttttttaccgttccagacgagggttttatgtgcacacaaattcccgctagagcgtttttcgatgatgtgtggatgggacgtgaagagtcgtatacaattataactgtagactcaacgggaatggccatctatcgtcagggaaacatatcttttatttttgatccacatggccatgggactataggacaggctgtagttgttcgggtgaataccacggatgtgtactcttatatcgcatcggagtatacccaccgccccgataacgtagaatcccaatgggccgctgcattagttttttttgtcaccgcaaacgacggtcccgtaagcgaagaagcgctatcttcggcagtaacgcttatatacggaagctgtgatacatattttacagatgaacaatattgcgaaaaactggttacagctcaacatccgttgcttctttcacctcctaattccacgacaattgtgcttaataaatcgtctatagtacctcttcaccaaaacgttggtgaaagtgtatccttggaagcaaccctacattcaacgttaaccaacacggttgcactggaccctagatgtagttacagcgaggttgatccttggcatgcggttctagaaacaacctcgactgggtctggcgttttggattgtcgtcgtagacgccgtccttcatggactcctccttcaagcgaggaaaatttagcttgtatcgacgatggcttggtaaataatacacattccacggataatttacataaacccgctaaaaaggttctcaaatttaaaccaactgtagacgtgccggataaaacacaagtggcacatgtattaccccgcctacgagaagttgctaacaccccagacgttgtgttaaatgtatccaatgtagatacgcctgaatccagtcccactttttcacggaacatgaatgtaggaagcagtttgaaagatcggaagccatttctatttgaacagagtggtgatgtcaacatggttgtcgaaaaactactacaacatgggcatgaaattagcaatggatacgtacaaaatgcggtgggtacgttggatactgttattaccggtcatacaaatgttcccatttgggtaacaaggcccttggttatgccagacgaaaaggatccattggagctttttattaacctcaccattttgcgtttaacgggatttgtggtggaaaatggaacacgtacacatcatggtgctacaagcgttgtatcagactttataggtccccttggggaaattttaacaggatttccctccgccgcggaacttatacgcgttacaagtttgatattaacaaacatgccgggggcggaatatgctattaaaactgttctccggaaaaaatgtacaattggcatgctcattatcgctaagtttggtctagttgccatgcgggttcaggatacaaccggcgctttacatgccgaactagatgtgttagaagcggatctaggaggttcgtcgcccatagacctctattctagactgtcgacaggtcttataagtatactaaattcgcctattatttctcatcccggactttttgccgagcttattccaacccgtacagggtccctgtctgaacgaatacgtcttctttgtgaattagtctcggcccgggagacacgctatatgcgtgaacacaccgcgcttgtttctagtgtaaaggctttagagaatgcattacggtctacccgcaataaaattgatgccattcaaataccagaagttccccaggaacccccggaagaaaccgacattccacccgaagagttaattcggcgtgtatatgagatacgatccgaagttacaatgctattgacctcggctgttacagaatacttcacccgcggagtgttatatagcacacgggccttgatcgctgaacaatcccctaggcgttttcgggtcgcgaccgcaagtacggcacccattcaacggcttttagattctcttccggaattcgacgctaaattaacggcaatcatatcgtccctgtctatacaccctcctcctgagactatacaaaatctccccgtcgtatctctgttaaaagagcttattaaagaaggggaagatttaaacacagacacggctctcgtatcgtggttatctgtagtcggggaagctcaaaccgcaggttacttatccagacgagagttcgatgaattatcacgtacaattaaaaccattaatacacgcgcaacgcaacgggcttccgcggaagcagagttgtcttgctttaatacgctaagcgcggccgtagaccaagccgtaaaggactatgaaacatataacaatggtgaggtcaagtatcctgaaataacacgggatgatttattagcaacaattgtacgtgctacagacgatttggtgcgacagataaaaattttaagtgatccaatgatccaatccggtttacaaccttcgattaaaagacgattggaaacaaggcttaaagaggttcagacgtatgcaaacgaggcccgaaccacacaggacacaataaagagtcgaaaacaggcggcatataataaactcggggggttacttcgcccggtaaccggttttgtgggacttagggctgcagtagatttattaccggaacttgcttctgagttagatgtccaaggagccctggtaaatctcaggaccaaagtcttagaggcgccggtagagatccgttctcaacttacgggtgatttctgggcgttatttaaccaatatcgagacattttagaacatcccggaaacgcacgcacatctgtcttaggaggactgggagcttgttttacagctattatcgaaattgtgccgatacctacggagtatagaccatcattgcttgcgttttttggtgacgtggcagatgtgcttgcatccgacatcgcgaccgtatctactaacccggaaagtgagtccgccataaacgctgttgttgcaactcttagtaaagcgacgttagtttcatctacagtgccagccttatcctttgtgttgtcgttatataaaaaatatcaggctttacaacaagaaattacgaatacccataagttgactgaattacaaaaacaacttggagatgacttctccaccctagctgtctcatctggacacttgaagtttatatcatcttcaaatgtagatgattatgaaataaacgatgcgatattatcaatacaaacaaatgtgcacgccctaatggatacggttaaacttgttgaagttgaactgcaaaagctacccccccattgtattgctgggacatctaccttatctcgagtagtaaaggatcttcataaactcgtcacaatggcacatgagaagaaggaacaggcaaaagtgttaattaccgattgtgaacgtgcacataaacaacaaacgactcgggttttgtatgagcgttggacacgtgatattatagcatgtctggaggcaatggaaacgcgccatatatttaacgggacagaactggcacggttgcgagatatggccgctgcgggagggtttgatatacacgcagtttacccacaagcacgtcaggttgtagcggcatgtgaaactacagccgttacggcattagatactgtgtttcgccacaatccatatacccccgaaaatacaaatattccaccacctttggctttgttaagagggttaacatggtttgatgatttttcgattacggctcccgtattcaccgttatgtttccaggtgttagtattgagggactccttctgcttatgcgtattcgcgcggttgtgttattatccgccgatacgtctattaatggaatacctaactaccgagatatgatattacgaacctcgggggatctattacaaatacccgcattggctgggtatgttgatttttacacacggtcttatgatcagtttataaccgaaagtgtaacgttaagtgaacttagagcagacatcagacaggctgccggggctaaacttacagaagcaaataaggctttggaggaagtaactcatgttcgggcacacgaaacggctaaacttgcacttaaagaaggtgtcttcattacattaccaagcgaaggtttattgattcgggctatagagtattttacaactttcgatcataaacgatttataggaacggcatatgaaagagttttacaaacaatggtagaccgcgatctaaaggaggccaacgcagagcttgcacagtttcgtatggtgtgtcaggcaacaaagaaccgtgcaatacaaattttacaaaacattgttgatacggccaatgccactgagcaacaagaagacgtggatttcactaacctgaagacgttattaaaactaaccccccctcccaaaacaattgcattggccattgatagatctacttccgttcaggacattgtcacgcagtttgcattgctgttagggcgtctggaagaagaaactggtacgttggacattcaggcggttgactggatgtaccaagctcgcaatattattgactcccatccactaagtgtgcgtatagacggtaccggccccctgcatacttataaagatagggtggataaactttatgcgttacgaactaaattagatctcctacgacgacgaatagaaaccggtgaggttacgtgggacgatgcatggacaacatttaaaagagaaacgggggatatgttggcatcgggggacacgtacgctacttccgtagatagtataaaggcactccaggcatcggcgtctgtggttgacatgctttgttccgaacccgaattttttttattgcctgtggaaacgaaaaaccgtctccaaaaaaagcaacaggaacgtaaaacggcgttggatgttgtgttgcaaaaacaaagacagtttgaagagaccgcgtctcgcttacgagctttaattgaacgtattccaacggagagtgaccatgacgttcttcgtatgttattacgtgatttcgatcaatttacacatttgcctatatggataaaaacacagtatatgacatttcgaaatttactcatggtacggttaggcttgtatgcaagttatgctgagatttttccacccgcgtctccaaacggagtatttgctcctattcccgccatgtcgggtgtatgtctagaagaccaatcccgatgcattcgcgcgcgggtggccgcgtttatgggggaggcgtctgtggtgcaaacgtttagggaagccagatcttctatagacgctttgtttggaaaaaatttaaccttttacttggatactgatggggttccacttcgatatagagtgtgttataaatcagttggggttaaacttggaaccatgctatgcagtcagggtggattatctttacgaccggcacttcccgatgaaggtattgtggaagaaactacactatcggcattacgcgtggccaatgaggtcaatgagctacgcattgaatacgaatccgctataaaatccgggttttctgccttttccacctttgttaggcatcgccacgccgaatggggtaaaaccaacgcacgcagagccattgcagagatatacgccggccttataacaacaacattgacacgacaatacggggttcattgggacaagcttatttattcttttgaaaaacaccacctaacttctgtaatgggcaatggactaactaaaccaatccagagaaggggtgatgtacgcgtattagagttaaccctatctgatattgtaactattttggttgccacaaccccggtacatcttctcaattttgctagattggatttaattaaacagcatgagtatatggcccgtaccctcagacccgtaatcgaggccgcatttagaggtcgtttactcgttcgctcattggatggagacccgaaaggcaatgcccgggccttttttaatgccgccccatccaaacataaactcccgttagctcttggatcaaaccaagatcctaccggcgggagaatatttgcatttcggatggcagattggaaacttgttaaaatgccacagaaaataacggatccttttgcgccatggcaactttcccccccccccggggtaaaggccaatgtcgatgcagttacccgtataatggcaacagatcgtcttgcgaccattactgtacttgggcgcatgtgtctcccgccaatttccttagtgtcaatgtggaatacgctgcaaccggaggaattcgcatacagaacacaagatgatgtggacattatagttgatgcgagactggatttgtcatccacgcttaatgcaagatttgataccgctcccagcaataccacgttagagtggaatacagaccgtaaagtaattacagatgcttatattcaaaccggggcaacgacagtttttacagtaacgggggcggcaccaactcacgtttctaatgtaacagcgtttgacatagcaactacggctattttatttggggctcctttggttattgccatggaacttacatccgttttttcacaaaattccggacttactttggggttaaaattattcgattcccggcatatggctacagattcgggtatatcctcagccgtatctcccgatattgtttcttgggggttacgtttactgcatatggatcctcacccaattgaaaatgcatgtttaattgtccaactagaaaaactgtccgcgctcattgcaaacaaacctcttacaaacaatcccccgtgtttactgctattggacgaacatatgaatccctcttatgttttatgggaacgaaaagactcgattccagctccggattatgtggtcttttgggggccagaatctcttattgatttgccgtacatcgactccgatgaggactctttcccctcgtgtcccgatgatccattttactcgcaaattattgccggttatgcgccccaaggccccccaaacctcgacacaactgatttttacccaacggagccactatttaagtctcccgttcaagttgttagaagttccaaatgtaaaaaaatgcccgtccggcccgcgcagcccgcgcagcccgcgcagcccgcgcagcccgcgcagaccgtccagcccgcgcagcccatagaaccgggcacacaaatagtggtacaaaattttaagaaaccccaaagcgtaaaaacaacccttagccaaaaagatattcccttgtatgtggaaaccgaatcagaaacggctgtgcttatacctaagcaattaaccacctccattaaaacaaccgtttgtaaaagtattaccccaccaaataaccaattgtcggattggaaaaataatccacagcaaaaccaaacgttaaaccaagcgttcagtaaaccaatacttgagattacctccattccgacagatgactcgatatcttaccggacttggattgaaaaatcaaatcaaacacaaaaacggcatcaaaatgaccctcgaatgtataactccaaaacagtattccaccctgtaaataaccaattaccttcttgggttgacacggcagccgatgccccccaaacggacctattgacaaactataaaacaagacagccgtcgccaaactttccgcgggacgtacacacatggggcgtatcttctaacccgtttaactcaccgaacagagacctatatcaaagtgattttagtgaaccttctgacggctatagcagtgagagtgaaaattctatcgtactaagtctcgacgaacatcggtcatgtcgcgttcctaggcacgtacgcgttgttaatgccgatgtagtcaccggtcgacgttatgtccgagggaccgccttgggagcactggcactgttaagccaggcatgtcggcgtatgatcgacaacgttagatatacacgtaaacttttaatggaccacacggaagatatatttcaaggcctggggtatgttaaattgttattagatggaacatatatataaagtagcgcctattaaagaaaaaaaaaaaacaacgattattttctgtgtatttttatttacaccctacgacttcttgaagcgtttccagattgtcccgtgtgtgacaaggtctgtcccttacccccctggggggtattttgggttgggggcggggtagactgtggcacgccttgggccgcgggcggtgatccggttgttggctggacagtgcttgactgtgctccctgttgcggttgttgtccagaagaccccgacaccacgtgttgctgttgtccaacggatgccgacgtcgtttgaggtggggggtgttgcggggatgatcccgaaaacgccaacgcggcgggctgttgtaaagcagactgatcggcgctctgtgttttttgcggcaatatagtaggccccgagattcccaaactcatggatggatttgggggttgtggtcgtataatacgcgggttaaacgtacgttttaagccaaccgttggtcttaaccatgtcatagggtcagtctcggcaaacatggccgttcggcgtatcgtatttgcattatggttagcgcgtgcacgcgcggcactggccgcggctcccacggtgtaaatgcttctggcatcagcgatgtccacacggtgaccaggttgcaaaggtccactggcgtttaaaagtcgtattaaagcaacgggggtgtaagccgcaattgcttccaccgaaaatgtggtggggttgctgggatcaaagactacacgagacgatgcgggttgtgtcatcgtttattagtttacgggacaatcgataacagcatacacgtacatctgcgcaggatatgtacggaaaggcaatttatttccagaaaagcaccgcccctaatacaactaccagtacaattacaatgaacagggcatatgtcacgttagctacgggtagagcaagtttccagacacgcgtagtttgggtatcgggtaacgcaggtttaatgtcactttgcatttgaacagacgtgtttggacttccgttctcgggtggggatctgaatgaaggccgccagcgtatatattcatccaaattattgccagtttccttatacatgtatgcatccgtggcgcgggccataagtttaatggtgcgagatggatcttccggtcccataaaacgaaaggataactgaacatatggcattcgcacaaagcagttcacccacattaaagcctggagaggtcggcggtcaatacccccacctcgtttaattgattccaaagcagataggttgataccggtacttaacgttgaactaagaatcacgttattactgtcaatggacacttcagccactggtgcgttagtcggacgaaaaaaaaaaccttgaaatagcacagacacccccgtattttgaatttttatgtaagggtcacaatctacttgcgcccaattcgccattaaacgcataatatactctaccggaaaggcttcggatacgttgtcttcgccgttaaactgaaaaacacaacgggcgggggggcgttgtggatcaaatattggaagatccccatcgcaacattgaagagcgcttggtaccaccaaccgaatacgttgtaaaagattatctccgcaacccctcctgcgttcactccgtacatacgttctccgtgacatattgatctaaggttgcaaaccaaggcacacgcgtgaagtatttagaccatttatcgtgggatataggaggagtttggagtgatccaccccctgacgacttattaatgcgtttattttccccatgtattaagcatccttcaatatttcatgcaaatctagaaatttggccatgactcccgcaaagcgttcacggcgacgggtcacgctggcactatgttcacatggaacaacataagcagatttttctgaatcgttactttctttatgttttaaaacggacgccaggcgactggtaaatgatatataatttaattgagcgtcagttgtaggtagaattgcttctatttccgggggaattaaattttcaaaccaaacggaaagagtaaaggtgctatcagcaggaaaatactttgactccagtgcatcgatatttaatagattaacatcggtgtctgtaattaaatcgcgggccctcatcccagagatggatcgggtagaatcagaagaacccatggatggattcgaatcgcccgtattctccgaaaatacatcttctaattccggatggtgttccgacgcattttccgattcgtacatcgcttataatccagcccttctgctaaaaaacgatttgttattttcagaattgttatttgcctcccacttaataaatgttccccgtgcaatagaaaacaacgtcacttatgaggcctcttcggcggtaggtgtggataatgaaatgacctcaagtaccactgaatttatagaagaaattggagacgttttggcgttagacagagcctgtttggtctgcagaacgcttgatttgtataaacgtaaatttggactgacaccggaatgggttgcggactacgccatgttatgtatgaaaagtctggcatccccgccctgtgcagttgtcacttttagcgctgcctttgaatttgtgtatcttatggatcgttactacctgtgccgttataacgttactttggttgggtcctttgccaggcgcacgctttccctgttagatatacaaagacatttttttttgcatgtatgttttcgtaccgatggagggttaccaggtatacgaccgccccccggtaaggaaatggccaacaaagtaagatattccaattactccttttttgtacaggcggtagttagggctgcattactatcgatcagcacgtctcgtttagacgaaaccgaaacgcgtaagtcattttactttaatcaggacggactgactggaggccctcaacctttagcggccgccttggctaattggaaagattgcgcgcggatggttgactgttcatcatcggaacatcgcacaagtgggatgattacctgcgcggaacgtgcattaaaagaggatatagagtttgaagatatattaatagacaaacttaaaaaatcgtcttacgtagaagcagcttggggttacgcagacttggctttattattactgagtggggttgctacttggaatgtagacgagcgtacaaattgtgctatagaaactcgcgttggatgtgttaaatcatactggcaggcgaaccggattgaaaactccagggacgttccaaaacaattttccaaatttacgagcgaggatgcctgtcccgaagtagcatttgggcctattttgttaactaccttaaaaaacgcaaagtgccgtggtcgcacgaataccgaatgcatgttatgttgtttattaaccatagggcactattggatcgctttgcggcagtttaaaagggatatattagcatactcagcaaataacacaagtttatttgactgtatcgaacctgtaatcaatgcatggagcctagataaccccattaaacttaaatttccatttaatgatgagggtcgattcataaccattgtaaaagcagcaggttccgaggccgtatataaacatttattttgcgatctcctatgcgctctctcggaattacagacaaaccctaaaattttatttgcccatcctacaaccgcggataaggaagtgttggagttatataaagcccaactggctgcacaaaacagatttgaaggtcgtgtatgtgctggcctgtggacattggcgtatgcatttaaagcctaccagatttttccacgcaaaccaaccgccaatgccgcattcatacgagatggaggacttatgcttcgacgacatgcaatatcgctggtctccctcgaacacaccctatcgaagtatgtctaggcgatataaatccgtatctcggagcgggccttcgatgcgtgtacgctccagaacgccatgccgccgtcaaaccattcgaggaaaacttatgtcaaaggagcggtctgtgtaccgccattattttaattacatcgcaaggtcccccccagaagaactagctaccgttagaggcttaatcgtgccaattattaagacgacccctgtcacccttccgtttaacttgggtcagacagtggcggataactgcctgtcgttatccggaatgggttatcatttaggtctcggaggttattgtccgacatgcactgcatctggagaaccgcgtctatgtcgaaccgatcgggcggctctgatactagcatatgttcagcagcttaacaacatatacgaatatcgtgtgtttcttgcatccattttggcgctatcagaccgagccaacatgcaagcagcgtccgctgaacccctattgtcgagcgtattggcacaaccggaattattttttatgtatcatattatgagggaggggggcatgcgagatatacgcgtacttttttatcgtgatggagatgccggagggtttatgatgtatgttatatttccggggaaatctgttcacctccattacagactaatcgatcatatacaggccgcgtgtcgggggtataaaatagtcgcacacgtttggcagacaacatttttactgtcggtatgtcgcaacccagaacaacaaacagagactgtggtgccatccattggaacatcggacgtttactgtaaaatgtgtgaccttaactttgatggagaattgcttttggaatacaaaagactctacgcattatttgatgactttgttcctcctcggtgatttcagcttcagtgttcattttattatcccagcacggggcgtgtatacaaacaaagcctgccgcctgcaagcggtttagcattttaacgttaacaactcgtgtctctggaataaaacgttttaaaagccgttctgtgagtttagtgtcgtttccaaataacgccttaaaagttacactcgccgtcccaatgagatgagaaaaataatagtcaatgtttaaagacagcccgtgtgatgttacgtgaatgggatcttccgctaagtcagatattattaacttacgctttgcttccccacaccgtttacctgcggtattctgtaaaggatctccacgtagcaaagctacactttttgcatcagcctccacttcgtctgtgggggccacaataacataagggatgcgttctcgaacgtttgggatttgaccctgtctcattactaatttataatatactgttaagtgagccaagcgacggtttatgtaggcggatggtggacgactaagctcggccgtcataacaaacttattaatatccaatttgggtgatgtaatctggcgatgtgcatctgcaattatgcgtccaaacccggccatcccagacggcatggcccgtctattccattcagcaatggaaacacacgacgcctccgccgcagcacgcgagacggtgtcgtcatataacaacagttctacaagtttgcgggcataatcgttaataaattgacagttgttttttctaaccaagtcgactcccttcattaaaacctttccgccgtaaattaccccaatgtactttttctttgttataagcaaaagttttataaaagttttttcacactccaactttataggaggacaaaacagagccgttgaaattatatgtgccattttctcgccgattttagctatcccctcaacactaacacccttgaatcggataaacacagaatccgtatctccatatataacctttacctcgtacgctttttgggagagaacgctactttcaatgtctggaaacgctgtaataaaacgttcaaatgcggcccagttattatgaatataatctctggtacttaataacatttgacggccaattgtagtgacagtggccgctacgtataaacatggcagaaatccctgcgcaactccagtaaaaccgtacacggaattacaaactacttttatcgcggcttgttgtttgtctaataacactgcttcatctgaagaacttccgggtatgcgcgctctaatagccttgcgcatagccaaccagtcttttaaaagaacacccagcagactttctcgaacgttagagcgcacaaaaaaaagacgttttcctccaactgtaaaggtggcataatcggatggattcaaacgtttaaccgtctcaaaatttaacgttagcgtggtaaaacataagttatgggcctgaattatacttggatataaacttgcaaaatccaatacgaccaccggatcgatataaaatcccgtatcagggtcaaaaaccctggctcctttatatcctacatttcgcccacttgacgtaccagtgggagaaacgctctcgtcttcatccatctcttcctcaacatccccgacatcgggaataacatccttatattcaaaagtagctgggtatcccccatcgggtaaaataaatcctcgagacgaagccagtcctaataaacaggtgtaaatcctaacctgctgtccgtcgtaaatagccttggttaaagtaattctagctagccttgcaaccgcggataactcaaggtgtggtaaatatttaaaaaacagtttccccacaagagccgagtcttgtatacaatattcaccaataattcctcgtgtattcggtccactagcgtaatatcccggaatgtctttgtagggcaaatctctcttggactcatttagagcttcacgtgcaaccgaatctaatttataactcgagagttttaatttttcagttgcaattgcatacatatccagagatatgagaccgttgatctttaccttgcttcgtcgctgaaatccggatttgccaacatcccatatcttaaacagacccccacggtttatactgccataaccatcaagcttgagactgtatatagaattaagtttctccataataaacgcccaatcaaaattaacaatgttataacctgtggcaaactcgggagcgtactgttttacgagggtcataaatgcaattaatagctcgaattcactatcaaactccagcacagtcggctccggtaaccccgcgtccttcatttcttgtacatacctttgtggtaagtcacaagagccaagggaaaacagtaaaatgtgttctaaagactgtcgagggattgaatataatagacaagaaatttggattacaagatcctccagatgtgttgcatcgggaaacgccagctcattagatcctcctgatttacattcaatatcgaaacataacaacttgtagtcaggccatgagtcatcgtttggtatagcctgcagattatccgacatgcagtcaatttcaacgtcgcttaacgttaattggcgacttgccggtcgaactcgaacacgttccccatcaactccaggttttagttgataccaaccaaaactaacaaagccgggattatccattagaaaacgagtggtagcgtctacccgaccttcatactttttcaactccgggtgaaagttatcacaaagataatttgtaaatttagatgagggagaatacaccctgtaaaacgcacatggctgtgtatcgtagtaataaacatctgtgcgctcaataacctcaacgcgaaagctttctggagatgcgcttttaaacgaggtaccatgaaaagcgttcttgtctccatttaacgttgcatcattttgtgttatcatagaactgcgtaaacactcggcaagtaatacagataactcgctaccggaacgtatgccacaagcggtatccacctcggctttgtttatataaaaatattgacagatgccgtatacatgaactgccaccctttttccacatcgggacatgccaagtaaagtaataacggtaccaagcggtcgtgttgcagttgcaaaccgggatacatctccattagacgcggcttctgttgtttcgacaatatcatatacatggaatgtgttaaagcgggggtcaaacttatccccacgaaagtcgatttccccccaaatattcacgcgtctaggccaggggctggaacaacgaaaatccagaatcggaacttcttttccattacagtaaactttaggcggtcgactaagtgtaccgacgtgaaccccctttcgttcttccatgggcacatcttcatctaaacatttaggggccaaaaattgaaacgatgacatggtagttttgtaactatgaagaaattctctgttactaccgcgcccggttcttgggttatatttaatccctgatgcttgggttaaaaagggattacaaaaccccgttctgatcgccattttatgttaacgattgataatcttgtaaaaagccagtgttactgagtaacacaaccccacgcccttctaatacataaagtgtaatcacgtgatttgttgtggtttccgcatatgtaatacccgtttaaaagcctctcttcttaatgtatcgacagactgggttttgggtggtcatttgaccctgccaacaaccccccattattacgagtacttcaccaaaatggaaaatactcagaagactgtgacagtgcccacggggcccctgggttacgtttatgcgtgccgggttgaagatttggatctggaggaaatttcatttttggccgctcgtagcacggactctgatttggctttattacctttgatgcgtaatttgaccgtggaaaaaacttttacatccagcctggcggtggtttctggagcacgcactacgggtcttgccggagctggtattaccttaaaactcactaccagtcatttctatccatctgtctttgtctttcacggaggcaaacacgttttacccagctccgcggccccaaatctcacacgcgcgtgtaacgcggctcgagaacggtttgggttttcacgctgccaagggcctcctgttgacggtgctgttgagacgaccggcgctgagatatgcacccgccttggattagagccagaaaatacaatattatacttggtggtcacggcattgtttaaggaagccgtatttatgtgcaacgtgtttctgcattatggaggactcgatattgttcatattaaccatggggatgttatacgtataccgttatttccggtacaacttttcatgcccgatgttaaccgtctggtacccgacccattcaacactcatcacaggtctatcggagagggttttgtatacccaacacccttttataacaccgggttgtgccatttaatacatgactgtgttattgctcccatggccgttgccttgcgcgtcagaaatgtaactgccgtcgcccgaggagcggcccaccttgcttttgatgaaaatcacgagggggcagtactcccccctgacattacgtacacgtattttcagtcctcttcaagtggaaccactaccgcccgtggagcgcgtcgaaacgatgtcaactccacgtctaagcctagcccatcgggggggtttgaaagacggttggcgtctattatggccgctgacacagccttgcacgcagaagttatattcaacactggaatttacgaagaaactccaacagatatcaaagaatggccaatgtttataggcatggagggcactttgccaaggctaaacgctctggggtcatataccgctcgtgtggccggggtcattggtgcgatggttttcagcccaaattctgcgttgtatctaactgaggtggaggatagcgggatgaccgaagccaaggatgggggaccgggtccatcatttaatcgattttaccagtttgccggacctcatttagctgcgaatccccaaacagatcgagatggccacgttctatccagtcagtctacgggttcatcaaacacagagtttagcgtggattatttggcactcatttgtggatttggagcacccctgttggcgcgactgcttttttatctagaacgctgtgacgctggtgcgtttacagggggtcacggggatgcgttaaaatatgttacggggacctttgactctgaaattccatgtagtttatgtgaaaaacacacgcggccggtatgcgctcacacaacagtacaccgacttagacaacgcatgccgcgatttggacaagccacccgtcaacctattggggtgtttggaacaatgaacagccaatatagcgactgcgatcctctaggaaactatgctccatatttaatccttcgaaaacccggggatcaaacggaagcagcaaaggcaaccatgcaggacacttatagggctacactagaacgcttgtttatcgatctagaacaagagcgactactggatcgcggtgccccatgttcttccgagggactatcgtctgtcattgtggatcatccaacgtttcgtcgcatattagacacactgcgtgcgcgtatagaacagacaacaacacaatttatgaaagtgttggttgagacccgcgattataagatccgtgaaggattatccgaagccacccattcaatggcgttaacgtttgatccatactcaggagcattttgtcccattaccaattttttagttaaacgaacacacctagccgtggtacaagacttagcattaagccaatgtcattgtgtattttacggacagcaagttgaggggcggaactttcgtaaccaattccaacctgttttgcggcggcgttttgttgacctgtttaatggggggtttatatcaacacgctctataaccgtaacattatctgaaggtcctgtatccgccccaaatccgacattgggacaagacgcgcccgcggggcgtacctttgatggggatttagcgcgcgtaagcgtggaagttattcgggatatacgagttaaaaatagggtcgttttttcaggtaactgtacaaatctctctgaggcagcccgggcaaggcttgtaggccttgcaagtgcgtaccaacgccaagaaaaaagagtggatatgttacacggggccctagggtttttgcttaaacagtttcacggcctgttatttcctcggggtatgccaccaaacagtaaatcccccaacccgcagtggttttggaccctgttacaacgcaaccagatgccggcagataaacttacacacgaagagattaccactattgcagctgttaaacggtttaccgaggaatatgcagcaataaactttattaatctacccccaacctgcataggagaattagcccagttttatatggcaaatcttattcttaaatactgcgatcattcacagtaccttataaataccttaacttctataattacgggtgccaggcgcccgcgtgacccatcatccgttttgcattggattcgtaaagatgtcacgtccgccgcggacatagaaacccaagcaaaggcgcttcttgaaaaaacggaaaacttaccggaattatggactacggcttttacttcaactcatttagtccgcgcggccatgaatcaacgtcccatggtcgttttaggaataagcattagtaaatatcacggagcggcaggaaacaaccgcgtctttcaggcagggaattggagcggtttaaacgggggtaaaaatgtatgcccgctatttacatttgatcgcactcgccgttttataatagcatgtcctagaggaggttttatctgccccgtaacaggtccctcgtcgggaaatcgagaaaccaccctatccgaccaagttcgcggtataattgtcagtggcggggccatggttcaattagccatatacgccacggttgtgcgtgcagtgggcgctcgagcacaacatatggcatttgacgactggttaagtcttacagacgatgagtttttagccagagacttggaggagttacacgaccagattatccaaaccctggaaacgccctggaccgtagaaggcgctctagaagcagtaaagattctagatgaaaaaacgacagcgggagatggggaaacccccacaaacctagcatttaattttgattcttgtgaaccaagccatgacaccacatctaacgtattaaacatttcagggtcaaacatttcagggtcaactgtccctggtcttaaacgaccccccgaagatgacgaactctttgatcttagtggtattcccataaaacatgggaacattacaatggaaatgatttaacctccctctttatccaattaaagcccacacgcgggtgagtgtacgtaataaacaagtcaatattacatattctgttgtgttttctttttttgtgtgtagtccttacccatatgacctgtaatatagtgtgtctccaaccattcagcttacagtccagtggacagtaacagcccgataacatggaattggatattaatcgaacattgttggttctactgggtcaagtttatacgtacatctttcaggttgaactgctacgtcgatgtgatccaagggtggcgtgtcgctttttatatcggttagcggctaactgtttgacagttcgttatttattaaagctgtttctccggggatttaatacccagctaaaatttggaaacactcccacggtttgtgcactgcattgggcattatgttatgtaaagggagaaggtgagcgtttgtttgagttgctacaacattttaaaacgcgttttgtttatggtgagactaaagactcaaactgtatcaaagattactttgtctcagcgtttaacttaaaaacctgccaatatcaccatgagctgtcgttaacaacatacggaggttacgtatcgagtgaaattcagtttttacacgacattgagaattttttaaaacagcttaattactgctatattatcacgtcttctcgtgaggcgctaaacacattggaaaccgtgacgcggtttatgacagatactataggaagcggtctaataccacccgtggagttgtttgatccggcgcatccatgtgctatatgttttgaagaattatgtataacagctaaccaaggtgagaccttacatcgtagattattaggatgtatctgcgatcacgttactaagcaagttcgggttaacgtggatgttgacgatattattcggtgtttaccatatatccctgatgtaccggatatcaaacgtcaatccgccgttgaagcgttacgaacacttcaaaccaagacggtagtcaatcccatgggagcaaagaacgatacgtttgaccaaacatacgaaattgcgagcaccatgcttgattcttataatgtttttaaacctgcccctcggtgtatgtacgccatcagcgagcttaaattctggttaacgtctaattccactgaaggaccccaacgtactttagacgtgtttgttgataatttggatgtattaaacgaacatgaaaaacacgcagaacttacagccgtaacggttgagttggcgttatttggaaaaactcccatacactttgatagggcgttttctgaagaactcggatctctggatgcaattgatagtattttggttggcaatcgctcatcctcaccagacagtcagatagaagcattaattaaagcctgttatgcccatcatctatcgtcgcctctcatgcgtcacatttctaacccgagtcatgataacgaagccgccttacgccaacttttagaaagagttgggtgtgaggatgatttaaccaaagaggcgagtgacagcgctacagcatccgaatgtgatctgaacgatgatagtagcataacttttgctgttcatggatgggaaaacctgttatccaaagcaaaaattgacgctgcggaaagaaaacgagtatatcttgaacatctgtctaagcgctctctaaccagcctcggtagatgtatccgcgaacagcgccaagagctagaaaaaacactcagggtaaacgtttatggagaggccttattgcagacatttgtttcgatgcaaaatgggtttggggcacgaaacgtgtttttagctaaggtttcccaggcagggtgtattatcgacaatcgcattcaggaagcggcctttgatgcacatagatttataaggaataccttagttcgacatacagtagatgcggctatgttacctgcacttacacataaattttttgagttggtcaacggcccattgtttaatcacgatgaacaccgttttgcacaaccccctaacaccgccttattttttaccgtggaaaacgttggcctatttccgcacttaaaagaggaattggcaaagtttatgggcggtgtcgttggttccaactggcttctcagtccatttaggggcttttattgcttttctggggtagaaggcgttacttttgcacagagacttgcctggaaatatattagggagcttgtgtttgcaaccacactattcacctctgttttccattgtggggaggtgcggttatgtcgcgttgaccgtctaggtaaggatccacgcgggtgcacgtctcaacctaaaggtataggcagttcccacggacccttagacggcatttatttaacgtacgaagaaacatgtccccttgtggctattattcaaagtggagaaacagggatcgaccagaataccgtcgtaatctacgattcagacgttttttctcttctatacaccctaatgcagcggctggctccggattcaacggacccggcgttttcataacctccgttacgggggtgtggttatgctttttatgcatattttctatgtttgttacggcggttgtgtcggtctctccaagctcgttttatgagagtttacaagtagagcccacacaatcagaagatataacccggtctgctcatctgggcgatggtgatgaaatcagagaagctatacacaagtcccaggacgccgaaacaaaacccacgttttacgtctgcccaccgccaacaggctccacaatcgtacgattagaaccaactcggacatgtccggattatcaccttggtaaaaactttacagagggtattgctgttgtttataaagaaaacattgcagcgtacaagtttaaggcgacggtatattacaaagatgttatcgttagcacggcgtgggccggaagttcttatacgcaaattactaatagatatgcggatagggtaccaattcccgtttcagagatcacggacaccattgataagtttggcaagtgttcttctaaagcaacgtacgtacgaaataaccacaaagttgaagcctttaatgaggataaaaatccacaggatatgcctctaatcgcatcaaaatataattctgtgggatccaaagcatggcatactaccaatgacacgtacatggttgccggaacccccggaacatataggacgggcacgtcggtgaattgcatcattgaggaagttgaagccagatcaatattcccttatgatagttttggactttccacgggagatataatatacatgtccccgttttttggcctacgggatggtgcatacagagaacattccaattatgcaatggatcgttttcaccagtttgagggttatagacaaagggatcttgacactagagcattactggaacctgcagcgcggaactttttagtcacgcctcatttaacggttggttggaactggaagccaaaacgaacggaagtttgttcgcttgtcaagtggcgtgaggttgaagacgtagttcgcgatgagtatgcacacaattttcgctttacaatgaaaacactttctaccacgtttataagtgaaacaaacgagtttaatcttaaccaaatccatctcagtcaatgtgtaaaggaggaagcccgggctattattaaccggatctatacaaccagatacaactcatctcatgttagaaccggggatatccagacctaccttgccagaggggggtttgttgtggtgtttcaacccctgctgagcaattccctcgcccgtctctatctccaagaattggtccgtgaaaacactaatcattcaccacaaaaacacccgactcgaaataccagatcccgacgaagcgtgccagttgagttgcgtgccaatagaacaataacaaccacctcatcggtggaatttgctatgctccagtttacatatgaccacattcaagagcatgttaatgaaatgttggcacgtatctcctcgtcgtggtgccagctacaaaatcgcgaacgcgccctttggagcggactatttccaattaacccaagtgctttagcgagcaccattttggatcaacgtgttaaagctcgtattctcggcgacgttatctccgtttctaattgtccagaactgggatcagatacacgcattatacttcaaaactctatgagggtatctggtagtactacgcgttgttatagccgtcctttaatttcaatagttagtttaaatgggtccgggacggtggagggccagcttggaacagataacgagttaattatgtccagagatctgttagaaccatgcgtggctaatcacaagcgatattttctatttgggcatcactacgtatattatgaggattatcgttacgtccgtgaaatcgcagtccatgatgtgggaatgattagcacttacgtagatttaaacttaacacttcttaaagatagagagtttatgccgctgcaagtatatacaagagacgagctgcgggatacaggattactagactacagtgaaattcaacgccgaaatcaaatgcattcgctgcgtttttatgacatagacaaggttgtgcaatatgatagcggaacggccattatgcagggcatggctcagtttttccagggacttgggaccgcgggccaggccgttggacatgtggttcttggggccacgggagcgctgctttccaccgtacacggatttaccacgtttttatctaacccatttggggcattggccgtgggattattggttttggcgggactggtagcggccttttttgcgtaccggtacgtgcttaaacttaaaacaagcccgatgaaggcattatatccactcacaaccaaggggttaaaacagttaccggaaggaatggatccctttgccgagaaacccaacgctactgataccccaatagaagaaattggcgactcacaaaacactgaaccgtcggtaaatagcgggtttgatcccgataaatttcgagaagcccaggaaatgattaaatatatgacgttagtatctgcggctgagcgccaagaatctaaagcccgcaaaaaaaataagactagcgcccttttaacttcacgtcttaccggccttgctttacgaaatcgccgaggatactcccgtgttcgcaccgagaatgtaacgggggtgtaaatagccagggggtttgttttaatttattaataaaaatgtgtattacgttactcatgtgtctccattacgcatcacagggggtatttatacccgataatatacaaaacgcgttttgtacctctaccgcacccgatatcttaacggggttattatggaatcgtctaacattaacgcgctacaacaaccgtcgtctatcgcacatcatccgtccaaacagtgcgcttcaagtctcaatgaaacagtaaaagattctccccccgcgatttatgaagataggttagaacacacgccggtacaattaccccgcgacggtacaccccgagacgtatgttctgtgggacagctaacctgtcgagcatgtgcaacgaaaccttttcgccttaaccgcgacagccaatacgactacttaaacacatgtccagggggccgtcatatttcactggcactggagattataacgggtcgatgggtttgcatcccgcgtgtgtttccggataccccagaggaaaaatggatggcgccatatattattccagaccgagaacaaccatcatcaggggatgaagattctgacaccgattaaatttaacttaaataaaaccttaccacccataaaaacgccttctgtttgtttaacacgacaccgcttaacaaaaaaaaaaaaaccaaacacgccttttatgaatgtaatacttttatttgttggttaacaccgccccaccatcatctgatttgcaaacatatcggcgtcgtctgccgtggacccctgtattaaaggggccttggaactcgcctccactgcatttacatcttgtccaactgtatctgtatgtggggtgcttgttgtattttgggatgagcatagacccgaaacgctttgaagctgttttaataaaatcgatattcgaggatcccgtgtcccctctggtatatttgtatggtgcgacaaaggcatttgtgtcccattttgtgattttagctctgtaacctcctgttgcagttttgccacaaccccagcaagctcttcgtgctgaccattagaaactctgtgtctcctctgccaatatgatggagaaactcgacgtctccgatgcgttatatacgttggttcaccgggaaaatatatatttgagggaaactctccgtccatttgagactccccactataaaaagaatccaattccctttgatccatgctcttgaaatcccgttttcctggacgacggacatcggttttgtctggaaaatttacacacggggtctgcaagtcaataccccgttcggcggccaatgcgttcataaatgcggacatttgcatttccaaacgattgggtggtggatatcccggaaacccgtacggtcccccgaagtgtcccggagggcaaccataaccccctgtattaggtgggaaggcaggcgggtgtggagatccatatggcccgacgatatactgtccgttatttggagctccaattgatacctgcggatttttagtctgcccggttaacagctgtgaataatacgcggtaggtatcagtacaaattcccctccggttggaacgcccgacgggggctgtggtgagatattactagcgttacctgctacagaagccatatcgctgtcgttcctacacaactgcgtaacctttaaatgcggaacagtcttttcacaatcttcatttgattccccaacacccaacgcgagatcgtatatgggcccgccggggtggaatgtggcgtttataacacccgcgttgggtaatttagactccaccccattaacgttggttatccgagcaagtccatatccggtgctagcctgaagataaacgtgacccataattccggcttcgcgtctacgttttgcaaccacgtcccatctatctcttaaaagcatattgttcacggctgtggataataacaccttggcgagtttatcttcgctaaccttccatactttatttaaacccgcgtagtctttaaccagcgacaataaccgcgctttactttccatcgataaaacccggaatggttcaattgaagattccggggtacagtcataattgaccactgttccaacgcgtcttccaacaacacataacgcaacatgggtaaaaaaattaccgtctggtatctcattcggggacaatcgttttgaagacagggatacggagggtaagtaatttgtgaccaagtataacgcacgttctagcggagataatacagaatctctatttccaaaaaaattcgaatgggccgcttcaaacagcaccgcatgtagttgagggcatctaacgatacccaaaaaaaaaggtccgcgtatgtcctcaatgattgcgattacttcacccacgacacagtcttttcgatgatcgatgtttattggtattttactagtaggcggcaaagcggaccgcacaatctctggggtaatatttaattccccttcgtcctttgaatataaggctaaatacccagccacgtataacgcttcacagttctcttcgtcagcttcagcagccattataaacaccccacggaccggatagtgaatactcacggtgtggaggcaaactgaggaatgacacccaaacagacaaaatatagaagatcatagtcactgttaacgttgaactgcgcaaggcggcgactttcttccaatgccgcccttacacgcggttggtgcattaacattccaagtccccgttcatattgcaacataacactgtcatgtattgataccacggcggctatgggtagggatgtaacattttgtcggcggtgttctaattccaatgcaattaagcttatgagccgatcttggtactgtccagaagaaatatctattacggttcttcctaaacttccacgactaagctgggtatgcgcgtctaaacaaagagcaactaatccaggaaacatttcagtcagctctgtggtccgatttaacgtatacagtggtgctatatatcgttcacataaaaattgaaagttattattaccgcttttaaacttcccatcaaaccccgtcgctccgcgcaagattacattgttggtaggggttcctgttgcttctgacacaatcaaacccagttgaaaattattttttagtttatctccgtatacgttcccgttccataataagcgccttaataataataacgccgtaatcgtgtcaattgttaaccttaatagagtttggtcttccataagaaacacgttttgggcccgttctaaatacgccgcggccgcctgttgaatcttgtccacatatgcggtatgattgcgatcaataatgtcattaaccccaggattaaactgtccaggtgcaggcggtaggacctgcaaccgtataagcgcatccataacagaatgtgacgttaaggcgccttgatcataccgccccccacgagcatgaaactggtcgcgtggtagacgatcatagcaaaattgataactgtttttattttcgtgtgttgtcatataattcacaaatgtctcagtatattccggtaggtgctctataaggttcccgaaggacgaaacttgaggttcgtggacactattagatgtcctatacattaaatataaacataataccgcacactcgaacgcggagtacgctctatctccaacatacattctcccggcggactgtagacatgttaccgttgtgttcataaacgtacgggaaatgcgcccgtctttacaatcaactccgcgtgcagctacgggcctatctaacacaagccgttcctgcagagtacgataccatggcccgaaaacaatccctggagagttattgccccttgcccttcccaagtacaccagggtgataaaatccacttgaaagtttgtatcgtactgcaacggtgcatcatttttggcaatctgtacctcggggtgtatagactcattgcgtattatttctgtacgtgtacattcctcagattgtgcatctgcttcttccgcctcggcagcagccgtctccagggaatccaaaaccttggccatgcgcgttagttgttcttcgaggggctttaaacgacgatctatttccgttggtaacgtaatcgtttccccgcgaaggttgtctaatgcggcaacggccgccgcattttttaacgttaacgtatttttttccaaatcgggattcatacgccctcttaactcaaacgcgggagccgtccagtagtgtatggggaagttgggggctataaagttcttagtggtagacaaaaatatcccacatttattcggaaacgagatagatccgaacccatatctcgccgtcatggtgtctgcagcaaacaaagtcaactggcgtgaatataaaccggtactgctttaaaagctgttttcttacccatgggaaaacatcccggttatactttgtaaaattccaccacaagcacctaaagaaggccttctaaggggtaaatccaccccacaagctgcattttcttcaaactttgttaaagcggaacgatggcatgatttcgcacgctttttcgcaagagaacatacgtgaattttctttttgcatagacgtcttcgctctctaacggaccttatcgggggggtatattccgctacattctccaaatgcgacgctagcataacaaggtttccatgaatcacctttgggggtaaccgagttacctgtaacaggttcagaccccgttgagatacaaacacaaggaggggggtcaccattatttcatcagatcccgtgggtgtggtttcctttattaaagccatggtatccctcagctggcgcataccctcgcaaaactggtgatacttagtaggggtatgtatattagcgctaaaacggcaagattttaattccactataaaacaaacggtctttccggcaccactggattccgtttgtataatacaaacacaatcggggcgtcggcgtcccaaatttacttcaaacgacattgatatgcgtacagccctttgaacatccacgtgggataacggcgacaggagttttgccagcctcgggttgaacgcgtccgcgaaacctcgacgtacgttatcaatatcctttttgagtacatcgtaaaaacgagtgtggcaacgttgtcccaaacgaaaacacttggcccgaattcgactagcggacatatttgaagttccgtcccagaagataacctaagacgcgtttgtctacaataaacatgtcaacggataaaaccgatgtaaaaatgggcgttttgcgtatttatttggacggggcgtatggaattggaaaaacaaccgccgccgaagaatttttacaccactttgcaataacaccaaaccggatcttactcattggggagcccctgtcgtattggcgtaaccttgcaggggaggacgccatttgcggaatttacggaacacaaactcgccgtcttaatggagacgtttcgcctgaagacgcacaacgcctcacggctcattttcagagcctgttctgttctccgcatgcaattatgcatgcgaaaatctcggcattgatggacacaagtacatcggatctcgtacaagtaaataaggagccgtataaaattatgttatccgaccgacacccaatcgcctcaactatatgttttcccttgtccagatacttagtgggagatatgtccccagcggcgcttcctgggttattgtttacgcttcccgctgaaccccccgggaccaacttggtagtttgtaccgtttcactccccagtcatttatccagagtaagcaaacgggccagaccgggagaaacggttaatctgccgtttgttatggttctgagaaatgtatatataatgcttattaatacaattatatttcttaaaactaacaactggcacgcgggctggaacacactgtcattttgtaatgatgtatttaaacagaaattacaaaaatccgagtgtataaaactacgcgaagtacctgggattgaagacacgttattcgccgtgcttaaacttccggagctttgcggagagtttggaaatattctgccgttatgggcatggggaatggagaccctttcaaactgctcacgaagcatgtctccgttcgtattatcgttagaacagacaccccagcatgcggcacaagaactaaaaactctgctaccccagatgaccccggcaaacatgtcctccggtgcatggaatatattgaaagagcttgttaatgccgttcaggacaacacttcctaaatatacctagtatttacgtatgtaccagtaaaaagatgatacacattgtcatactcgcgtgtacgtgtttttcttttttatatatgcgtcatttattaccacatcctttaatcccgcctttatctccctaaaacggagtggtaatattaaaagccgccaagcctgttggtgggtgaggaggggtaaaggcacgctgtgtgcataacgttgcggtgatattgtagcgcaagtaacagcgactatgtttgcgctagttttagcggtggtaattcttcctctttggaccacggctaataaatcttacgtaacaccaacccctgcgactcgctctatcggacatatgtctgctcttctacgagaatattccgaccgtaatatgtctctgaaattagaagccttttatcctactggtttcgatgaagaactcattaaatcacttcactggggaaatgatagaaaacacgttttcttggttattgttaaggttaaccctacaacacacgaaggagacgtcgggctggttatatttccaaaatacttgttatcgccataccatttcaaagcagaacatcgagcaccgtttcctgctggacgttttggatttcttagtcaccctgtgacacccgacgtgagcttctttgacagttcgtttgcgccgtatttaactacgcaacatcttgttgcgtttactacgttcccaccaaacccccttgtatggcatttggaaagagctgagaccgcagcaactgcagaaaggccgtttggggtaagtcttttacccgctcgcccaacagtccccaagaatactattctggaacataaagcgcattttgctacatgggatgcccttgcccgacatacttttttttctgccgaagcaattatcaccaactcaacgttgagaatacacgttcccctttttgggtcggtatggccaattcgatactgggccaccggttcggtgcttctcacaagcgactcgggtcgtgtggaagtaaatattggtgtaggatttatgagctcgctcatttctttatcctctggaccaccgatagaattaattgttgtaccacatacagtaaaactgaacgcggttacaagcgacaccacatggttccagctaaatccaccgggtccggatccggggccatcttatcgagtttatttacttggacgtgggttggatatgaatttttcaaagcatgctacggtcgatatatgcgcatatcccgaagagagtttggattaccgctatcatttatccatggcccacacggaggctctgcggatgacaacgaaggcggatcaacatgacataaacgaggaaagctattaccatatcgccgcaagaatagccacatcaatttttgcgttgtcggaaatgggccgtaccacagaatattttctgttagatgagatcgtagatgttcagtatcaattaaaattccttaattacattttaatgcggataggagcaggagctcatcccaacactatatccggaacctcggatctgatctttgccgatccatcgcagcttcatgacgaactttcacttctttttggtcaggtaaaacccgcaaatgtcgattattttatttcatatgatgaagcccgtgatcaactaaagaccgcatacgcgctttcccgtggtcaagaccatgtgaatgcactttctctcgccaggcgtgttataatgagcatatacaaggggctgcttgtgaagcaaaatttaaatgctacagagaggcaggctttattttttgcctcaatgattttattaaatttccgcgaaggactagaaaattcatctcgggtattagacggtcgcacaactttgcttttaatgacatccatgtgtacggcagctcacgccacgcaagcagcacttaacatacaagaaggcctggcatacttaaatccttcaaaacacatgtttacaataccaaacgtatacagtccttgtatgggttcccttcgtacagacctcacggaagagattcatgttatgaatctcctgtcggcaataccaacacgcccaggacttaacgaggtattgcatacccaactagacgaatctgaaatattcgacgcggcatttaaaaccatgatgatttttaccacatggactgccaaagatttgcatatactccacacccatgtaccagaagtatttacgtgtcaagatgcagccgcgcgtaacggagaatatgtgctcattcttccagctgtccagggacacagttatgtgattacacgaaacaaacctcaaaggggtttggtatattccctggcagatgtggatgtatataaccccatatccgttgtttatttaagcagggatacttgcgtgtctgaacatggtgtcatagagacggtcgcactgccccatccggacaatttaaaagaatgtttgtattgcggaagtgtttttcttaggtatctaaccacgggggcgattatggatataattattattgacagcaaagatacagaacgacaactagccgctatgggaaactccacaattccacccttcaatccagacatgcacggggatgactctaaggctgtgttgttgtttccaaacggaactgtggtaacgcttctaggattcgaacgacgacaagccatacgaatgtcgggacaataccttggggcctctttaggaggggcgtttctggcggtagtggggtttggtattatcggatggatgttatgtggaaattcccgccttcgagaatataataaaatacctctgacataaaaaacatgtataataaaaagtcactataaacgtattctctacaatactttattcgcgaataatacacactacctttgggtttttttcccgtccccaaatggtgtttggtgcactctaccaaaaaatagagcgcctaaatatgctatataacgcctcccagcaaaatacggttcaaaggcattacccgatattgtattgtagtacagggcaatgggaattgatgatcccaataaacggcatagacgcacagcgccgttatagcaggggtctccagagtacagggtatctaagtaccgggatatctcatactcatgcctttccgtgacagaaacatcaaccggaacagtatccgataaaccaactcctgtttttgcaaggcgtaaaattcgcacaccttccttttttgcaagatgtgacgtttccttgtaacagggaagctgggggagtggtaagaacaacaaagtttcagccaacgtgccaataaagcccacttccctcaagaggctgtttgctgtatccacaatggtccgtattaaatcttgagcaacttgatccgtgtcatcatcactgggtaacgcgttaacataactacgcgttaaatcttcaataacggcataacaattaaacgcttcccaccgagacagtatatattgaacaatcacgaaccgttgacaggacgtcagatcacgtccgtaagcatgcccgaaaaatggaagttccccccgttcgccatataccgcaacaactgcagtatatatcgtctcacgggcttcattaagttcatcttcaagtccaggccattttctggctttaaatataacctcgtccgcaaaaaaaaccgcacatgataacgcgcggatacaatgagtagtggctttatggcgaggatcccaaatgtccattacccgggggatggtcctaatctgtacaaagttacttagtgtaatatgatcggacttcttacgccgtctaggctgtttctcagaatacggttcacccgaaatcggcacatcatctgcttttacgtcttccgtaaccacatcagcagcgcgccgactaacaattatacttgttttttcatcgtcgttacttccgttaagcgcgtctcgtatctcgggcgtcccgtcgaataatccactcactagctcctgcaaactttctggtaactccaacatacgcatatacaccaatgaaaaactggcttcgtttggtacgtacataaagccatttgtggtattaatggcggtgggtgttggaaacaattttagcttattctcgcgcgtaacatctacccccgccaccaatgttaaatgcgtcacggggagggacacgagataatctgcgagcgtagggtcctccacttcaacatcaaatgttccgcaaaggtcgcgatccaccgcccccgatcccgctgcaagtaaggccactcgatccaaaaacacgcagttattattggatgataccgcccatgtcttcccggtgcgattgagctcacttcgaacgtaactggcaacagatctgtcaccgggtccgaccccgcgaacaacatgtccaaattttgcgatctcgcctccatgtttgcggggtatggaaattaagcatcccccgcatataaaatacgccctggtagcacgctcgttaaaataaaacgttacgccgttataagatacggttgaatgatatggaaattccatattaaagcgtttatcggaacattaacctcgaacttgccgtcccgtgatcgtgtgatcgccaaccttaggtccacaccgaatatgagaaatatataactacacgcaaacattcaaaacaccgtggtatcattaacgtcatatgaaaagatccaatcaatccaatcaaccacacctcctaccgtttagcacgtcagctatgtgacatgctccaaacatacgtaaacatttagagagggtgttataacagtctgtcaggcggggtatattctacataatacaaggatcggctttaactttgtcaacatttttactttggactataaactgcgactgaacgttatgaacccaccccaagcccgcgtctcggaacagacaaaggacttgcttagcgttatggttaaccagcaccccgaagaggacgcaaaagtgtgtaaatccagtgataattcaccgctttataacaccatggttatgttatcgtatgggggtgatacggacttactattaagctctgcatgtacccgcacatctaccgtaaacaggtcggcgtttacgcaacactccgtgttttatattatatccacggtgttgattcaaccaatatgttgtatcttcttttttttttactataaagcgacacgctgtatgctcttattcacagccgggttacttctgacgattctacatcactttcgacttattattatgttattgtgtgtctacagaaatatacgatcagacctgctacccttatctacatcccagcaactgctgcttggaattattgttgtgactcgaacaatgctattttgtattacggcgtattatactctttttatagacacccgggtgttctttttgattaccggacacttgcaaagtgaggttatttttccagatagcgtttcaaaaatacttcctgtgtcgtggggtccaagtccagccgtgttactggtaatggcggcagttatttacgctatggactgtttggtggacacggtatcctttattgggccaagggtgtgggtccgtgttatgttaaaaacatctatttcgttttagtccatttcaataaatgtactataattgttcagtctaaaaataatgttgggtatttataattaccgcccccgtgttacttggaaacacccatacatatgttccactctacatcaaacttctcgcagttttcttgttcccgcacacgtttacacgtccggattcaagtcgcaacgctgctgacaaaatgacaacggtttcatgtcccgctaacgtgattactacaacggaatctgatcgtattgctgggttatttaacatcccagcggggatcattccaactggaaatgtgctgtcaaccatagaggtgtgtgcacaccgttgcatttttgatttttttaaacaaatacgatcagatgataacagcctttactcggctcaattcgatattcttttggggacatactgcaatacattaaactttgtgcgttttctagaacttggactgtctgtcgcttgcatctgtactaaatttccggagctggcttacgtgcgagatggcgttattcaatttgaggtacaacaacccatgatagcacgtgatggcccacatcccgtcgatcagcctgttcataattatatggttaagcggatacacaagcgttcgttaagcgctgcgtttgcaattgcatcggaagcgttgagtttgttaagtaacacatatgtcgatgggacagagattgactcatcgttacgtataagagctatccaacagatggctcgtaatttacgcaccgttttggactcatttgaacgaggcactgccgatcaacttcttggtgttctattggagaaagccccaccgctatcgctgctttcaccaattaataaattccaacccgagggacatctaaatcgtgttgcacgcgcggccctactttcggacctcaaacgtagagtctgtgcggatatgttttttatgacccgacacgccagggaacctaggctgatctctgcgtatctgtcggatatggtttcgtgcacccaaccatcggtgatggtatcacgaataactcatacaaacactcgcggacggcaggttgacggtgtgttggtaacaacagcaaccttaaaacggcaactattacagggaattttacaaattgacgacaccgccgctgacgtaccagtaacatatggcgaaatggttctacaggggacaaacttggtaaccgcccttgtgatgggaaaggccgtccgcggaatggatgatgtagcccgccatctccttgatataaccgaccctaacacgttaaacataccgtctatacccccacaatccaactccgattcaacgacagctgggcttccggttaacgcccgtgttcctgcggatttagtgattgttggggataaacttgtattcttagaagcattagaacggcgggtctaccaagctacgcgcgttgcctaccctcttattggaaatatagatattacgtttatcatgccaatgggagtgtttcaggcaaactccatggacagatatacacgacacgccggcgatttttcaactgtatccgaacaggatccacgtcaatttccaccccaagggatttttttttataataaagatgggatattaacacagttgactcttcgtgatgcaatgggtaccatctgccacagttcattgcttgatgtcgaggccacacttgttgccctccgccaacaacatttagatcgtcagtgttattttggtgtatacgtggccgagggtacagaggacacattggatgttcaaatggggaggtttatggaaacgtgggcagatatgatgcctcatcaccctcattgggtaaacgaacatttaacaattctacagtttatagctccgagcaacccgcgtctaaggtttgaattaaaccccgcctttgatttttttgttgcaccgggggacgtagaccttcccggaccgcagcgtcccccggaagccatgccaaccgttaacgcaacattacggattatcaacggaaacattcccgtgcctctatgtcccatttcatttcgagactgtcgcggaacccaactcggtttgggaagacatacaatgaccccggcaaccattaaagccgtaaaggatacatttgaagaccgcgcatacccaactattttctacatgctagaggctgttattcatggaaacgaaagaaacttctgtgcgttactgcgactgttaacacagtgtattcgcgggtattgggagcaatcccacagggtggcatttgtaaataactttcacatgttaatgtacataactacatatctcggaaacggtgagcttcccgaagtctgtattaatatatatcgggatttactgcagcatgtaagagcattacgccaaactataaccgattttacaatacaaggagagggccataacggcgagacctcggaagcgctaaataacatccttacggatgacacgtttattgcacctattctatgggattgtgatgcgttaatataccgtgatgaagccgcccgagaccgactccccgcaattcgtgtaagcgggcgaaacggataccaagcccttcactttgtggatatggccgggcataacttccaacgacgcgataatgtgttaatccacgggagacccgttcggggagacacgggtcagggtattcccattactccacaccatgaccgtgaatggggtattctctccaagatttactactatattgtcattcctgcattttcccgcggttcctgttgtacaatgggcgtgcgttatgatcgcctataccctgcgttacaggcagttatcgttccggaaattcccgctgatgaagaagccccaactaccccagaagatccaagacaccctcttcacgcacaccaactcgttccgaactctcttaacgtttacttccataatgcacacctaaccgttgatggtgatgcattgctcacactacaagagttaatgggagatatggctgaacgaacgacggccattttagtatcaagcgcccccgatgcgggagccgccacggcaacaaccagaaatatgagaatatatgacggagcgctttaccatggccttattatgatggcatatcaggcgtacgatgaaaccattgcaacgggtacttttttttatcccgttccggtcaaccctctgtttgcatgtccggaacatttggcatcattgcgtggaatgacaaatgctaggcgggttttggcaaaaatggtaccaccaatccctccttttctgggagccaaccaccacgcaactatacgccaacccgttgcctaccatgtaacgcatagtaagtcggattttaatactcttacatattctcttcttggagggtattttaagtttacaccaatatctcttacacatcaactacgaacgggatttcaccccgggattgcctttaccgtagtgcgccaggatcgctttgccacagagcaacttttatatgccgagcgtgcttctgaatcgtactttgtcggacaaatccaagtacaccatcatgatgctattgggggggtaaactttaccctaacccaacccagagctcacgtggacctgggagtcgggtatacagctgtatgtgccacagcagccctgcgatgccctctcacggatatgggcaatactgcccaaaatctttttttttcacgaggaggagtgccaatgttacatgataacgttaccgaatcgttgcgtcgtataacagcatcggggggtcgcttaaatcccaccgaacccctacccatcttcggcggactacgtcctgctacatcggcaggaattgcacgagggcaagcctctgtgtgtgagtttgtggccatgccggtgtccactgacctacaatattttagaactgcatgcaatcctagaggtcgagcatctggaatgttatatatgggtgaccgtgacgccgacatagaggctataatgtttgatcacacacaatcggatgttgcttatacagatcgagcaactcttaacccatgggcatcacaaaaacattcatacggtgacaggctatacaacggaacatacaaccttacaggcgcttctcctatctacagcccatgctttaagttttttacaccagcggaggttaacactaattgtaatacactggatcggcttctaatggaggcaaaggctgtggcgtcgcaaagctccaccgacactgaatatcaatttaaacgccctcccggttctaccgaaatgacacaggatccgtgtggcctttttcaagaagcatatccaccactatgctcaagcgatgcggccatgttacgaacggctcacgcgggagaaaccggggcagatgaagttcacttagcccaatatctgattcgagacgcgtcgccccttaggggatgtcttcctcttccgcgataatttcaccacgcccacatacccactcccaataaaagccctgtagagcgcattggcatcttacttgagatttggatacgctcggccgacttggtctgtttcacgcttccttaaacaacatggctatgccatttgagatagaggtattgttaccaggagaactatccccggcggaaacatctgcattacagaaatgtgagggaaaaattattaccttctcaaccctgcgtcatcgagcttcactggtggatatagcgctgtcgtcatattacattaacggtgctccaccagacacgctctcgctgttagaggcataccgaatgcgattcgcggcagttataacacgggtcatcccgggaaagttgttggcgcatgccattggcgtgggtactcctacacccgggttgtttattcaaaatacatcccccgttgatctttgtaatggcgattacatctgcttacttcctccggttttcgggtccgcagactcaattcgcttggactctgtaggactggaaattgttttccctttaaccatcccccagaccttaatgcgagaaatcatcgccaaagtggttgcacgggccgttgagcgcacggccgcgggtgctcaaattttaccccacgaagttctacgaggcgcggatgtcatttgttacaatggaaggcgttatgaactcgaaacaaatttacaacatcgggacggatcggatgcggctattcgcacattggttttaaatctaatgttttccataaacgagggatgtctgcttttattggcgctgattccaactttgttagtccaaggagcacacgacggttatgtaaatttattgatacaaacggccaattgcgttagagaaaccggccagttaattaatataccgccaatgccgcggattcaagacggccatcgccgatttcccatatatgaaactatttcatcttggatatcaacatcatctagactgggggataccttgggaactcgcgcaattttacgcgtctgtgtgtttgatggaccctctactgttcatccgggagaccgcacggccgtgattcaagtgtaaacaggtgttaataaaaacacaaccagtctagttacatttcacgcgtcttgtttttatttaataggcataaacacggaatccggtatacatgaactgccaatatacacggacataattaatgcaaccatcagatcatctgacattgttcccgtggtacctttacccgtgtaagtttttgtgtctagattacccataccgcctttaattacctctgtcaggttatccaactgtttacatagatactccacggggtctacacctaactttactgttagggatacaagctcctgtgaggctattatatttccggagttaaatcgtttaacaaaatagtctacggccggcgttttttgtttttgtaataaaaaaaaagggtacgccacgctacatccgggaggtatggaatgataaaacagtaacactggagcggaagatagcacgtttcccttttcgaggacagcaaactgttgtgctatagccaacgatatggcaactgcagaatcctggctgctgtttccctctatagaaacgtgtacgtttgtaaatgtattggggtgtaaagcgagtatgtggcctaagcattgagtaacgcaacgccctatctcactggaagacgtgccagttaaagctctaagaaaaaagtgctccaatccaaatataatccaatccgacttataacgaccaacaatcgctacaccagtaccagacgctcgtgtatttgaggtaaatgcagggtctacgtaaacgtacaacactgacgataatatagcacaattcgcaacggttgacggccgatataaaataaacctctcacgggcagtttttgtaaataatggccggtcaaaccccacacccccagaattctgtttacgcccacctacaatttcctgcacgaaggagtcggccataaataaatctgcagtgcgccgcatggctccatccattgtgatgaaaaccggcttatttaatacataacacgaacaagctgtgacatcgctatgtgctaaaacacgcggcatgtgatcgtcgcatacatatgtaacaacgtttaacaactgatccgacgatccacgtaagttatacaaaaaacttgtacttgcttttccggtatttgttgatgaaacaaaaataattttacaattggtttgatttaaaaatccgactatagtttgtacagcatcaggtcgaataaaattagcttcatccacaaacagaagattaaaatcttgacctcggataccctggaacgatagaaagatatatagttaccccaccaaagtttaaatgtatccttaaataccacgtacgtaaaaaatgtttgaatacgtacatatttcttttttttttccagtacaaccatatccggtgtataatggaagcccatttggcaaatgaaaccaaacatgcactttggcataatgatcacacaaaaggattactacacgttgtgatacctaacgcggggcttattgcggccggaatagatcccgcattactgattttaaagaaacccggacaacgcttcaaggttgaagtacaaacaagatatcatgctacaggtcaatgcgaaccgtggtgtcaagttttcgccgcgtacattcccgataacgccttaacaaatctcttaataccaaaaacggaaccatttgtttcacacgttttttcggccacgcataattcagggggattgattttatcattgcctgtttatcttagccccggtttattctttgatgcatttaacgttgtagcgatacgaataaatactggaaaccgcaagcaccgtgatatttgtattatgtatgcagaactaatcccaaacggaacgcgttattttgctgatggacaacgggtacttttattatgcaaacagctgattgcgtatatccgatgcacccctcgtcttgcatcgtctataaaaatatacgcagagcatatggtggcagccatgggtgaatcacacacgtcaaatggggacaatattggacccgtttcatccataatcgatcttgatcgacagttaacttctggaggtattgatgactcccctgctgaaacacgcatacaggaaaataatcgggacgtccttgagctaataaaacgggccgtaaacattgttaactccaggcaccccgtccgaccttctagttcccgcgttgcatctgggttgcttcaaagtgcaaagggccacggagcgcaaacttccaacacagatccgatcaataacggttcctttgatggcgtccttgagccgcctggacaagggcgatttacgggaaagaaaaacaattcgtccgccagcatcccacctttacaagacgttctattgtttaccccagcttcgacagaaccccaaagtcttatggaatggttcgacatctgttatgcccaattagttagcggggacactccagcagatttctggaaacggcgtcccctatcaattgtaccgcgacattacgcagaatcccccagtccgttgattgtagtatcttacaacggatcctctgcctggggaggacgtattaccggaagtccaattttatatcactctgcacaggctattattgatgctgcgtgtataaatgcccgggttgacaatccccaaagcctacatgtgacagctcgccaagagctagtcgcgcgtttaccgtttttggctaacgtcctaaataatcaaacccccttacccgcctttaaaccaggcgccgaaatgtttttaaaccaggtatttaaacaagcgtgtgtgacatcgctaacccaaggtcttataacggagttacaaacgaacccgactctacaacaactcatggaatatgatattgcagattcttcccaaacggttattgatgaaattgtagcccgcacaccagacctgattcagactatagtttcggtgttaacggaaatgtcaatggatgcgttttataacagctccttgatgtatgcggttttggcgtatctgtcatctgtatatacacgaccacaaggtggggggtatataccctaccttcacgcttccttcccatgctggttaggtaatcgttctatatatttatttgactattataattcaggaggggaaatacttaagctttccaaggtccccgttcccgtagccttagaaaaggttggtattggtaattccacacaactgaggggtaaatttatacgcagcgcggatattgttgatattggaatttgttctaagtatttacccggtcaatgttacgcgtacatttgtctaggatttaaccagcaattacaatccattttagttttaccggggggatttgcggcatgtttttgtattaccgataccctacaggcagcactacctgcatcgttaatcggacctattctagacagattctgcttctctattcccaacccccataaataaattagtgtcactataaaaacataacaccagaatctcttcatatgtaattttacgtcatttctcccgtttccaccccctcttaaaatataaaataaccgggtgggtggcattaaacccacaagtacccgggcggcaatccgctagactgtttttctgctcatggaattacaacgcatatttccgctgtacaccgctacgggtgcagcgcgcaaattaacccccgaggcagttcagagactctgcgatgcattaacgctggatatgggattatggaagtccatcctgaccgatccccgggtgaaaataatgcgatcaactgcttttataactttaaggatcgctccgtttatcccccttcaaacggatactactaatattgccgttgttgtagccacaatttacatcacgcgcccacgtcagatgaacttacctccgaagacttttcatgtaattgtaaattttaattacgaggtctcgtacgcaatgacggcgactttaagaatttatccggttgaaaacatagaccatgtttttggagcaacgtttaagaacccgatcgcgtacccccttccaacatctattccggatcctcgagcagatcccacccccgcagatcttacaccaacgccaaacttaagcaactacttacaacccccgcggcttccgaaaaatccatacgcatgtaaagttatttctccgggagtgtggtggtcagacgaacgaaggcgtttatatgtactggctatggaacctaatttaatagggctatgtcccgccggatggcatgctcggatacttggctctgtattaaatcgactcctcagccatgcggacggatgtgatgaatgtaatcatagagttcacgtgggggcactgtatgcgttaccccatgtcacaaatcatgcggaaggttgtgtgtgttgggctccgtgtatgtggagaaaggccggtcagcgggaattaaaagtggaggtagacattggcgccacgcaggttctttttgtagatgtcaccacctgcattcgaattacgagtactaaaaatcctcgcattaccgcaaatcttggcgacgttatagcgggaaccaacgccagtggtctctctgtaccagtaaattcatctgggtggcagctttatatgtttggagaaacattaagccgggctattattaacggctgtggtctgcttcagcgaatttgcttccccgagacacaaagattatcgggtgaaccggaacctacaaccacctagtataccttaactcaaccgccgttgtggaaaggtatatgtcaacatttacagtaatatattaaaggttaaatttataaaacactcacgtttgtgttgtgacttgacgcgaacaccgctgtgctgtaagacccgtcggtaaatgaaaacgtaatagattcgccttttacatgatccacgtaatttgccccaaaccactgttccaggcgagacttgataccctcaaacacgggttccgttgctttgcgtatatgagccgtataacccactttaattcctctaaacgtggccattactaaagctattaatggtacaagaaaccatgttttcccatgtctacgtggtaccaaaaacacagttgatttttgtttgaagtgttctaaaacactgtcagaaacacttggcgtgttaaacactgtacgcagaaagcagtcaactctgtcggcatgatcgcccaatagcaccgatgaaataaaatgcgtggtgtgcatgaggatcattttttgaaacagttccaacgtccccttatatctgccatagattggaacgtcaacctttgcgcgtttgccatgacttccacactcttcaatactctcaaaagatgtttccacaaggtacgaaaaccgttgtgtaaaggtagacaactgacagaaactatccgacagagaaaacgcgcgaaatgtgttcataacaccgctatacgcatttcgatgaggtgctgcttcttccggtgaatattcataaaactgtacactactgacagccttttttaattcagggcttacgtttgcatttaccgaatatcgccatggtttcaaaactacattgggggtacagttgtaccctgttgacgatagaaacgcgccaaacattgcccgtcgagcagtagccgagaacagtggaatatattcacaacagttgtgaagcgttccaattccgggaataacggcctgatgacgtcgggttacatctatagcaaaattcagaaacgggatttgggttgcgtttcccagagacccttgccgcgtggaacacggggtaggggactccaacgtcccaaagcgttcatccctacgacgctttagacgttcaaaatatcttacagattcttcaccaagcgtacgaccaaacattatcaatgacatttaacatcaattcacggaatccgcctcatctcttgtaagcagtaaaacaggaagccgcgtcatcttacgtactcgttacgtatatatcataaacattttcagggccgcattcattcactttggtcatgtcaggccacactccaacctacgcttctcataggcgtaaccgtgtcaaactagttgaggcgcataaccgcgcggggttatttaaagaacggaccctcgatctaatccgtgggggtgcgagtgtacaagatccagcatttgtgtatgcctttactgctgcaaaagaggcctgcgccgatttaaataaccagctccgctctgcagctcgcatagcttcagttgaacagaagattcgtgatatacaatccaaggttgaggaacaaacaagtattcaacagattttaaatacaaacagacgctatatagcacccgattttattcgcggtttggataaaacagaagacgataataccgataatatagacagactggaagacgcggtaggaccgaacatcgaacacgaaaatcatacttggtttggagaagacgacgaagcgttacttacacaatggatgctgacgacacaccccccaacctccaaatatctccaactgcaggacctttgcgttcccaccacaataccgacggacatgaaccaaatgcaaccgcagccgatcagcaagaacgagaatccaccaaccccacacacggatgtgtaaatcatccatgggccaatccgtcaactgcaacatgcatggaatcaccagaacgatcacaacagacaagcttatttttattaaagcacggcttaacgagagatccaatacatcaacgcgaaagggtggacgtttttccacaatttaacaaacccccatgggtttttagaatttccaaattatcccgtttaattgtacccatcttcacgctcaatgaacagttatgtttttctaaattacagattcgagatagacccaggtttgcgggacggggaacgtatgggcgtgttcatatatacccatcgtcaaaaatagctgtaaaaaccatggacagtcgtgtttttaatagagagttaattaacgcgattttagcgagtgagggttctatacgagcaggggaaaggctaggtatttctagcatagtttgccttttaggtttttcgttacaaaccaaacagctactgtttccggcatacgacatggatatggatgaatacattgttcgcctgtccagacggttgacaatacctgatcacatagacagaaaaattgcccatgtatttttagatttggctcaagcgttgacgtttttaaatcgaacgtgcggcctgacccacctagatgtgaaatgtggcaatatttttcttaacgtcgacaactttgcctcgttggaaataaccacagcagtaatcggagactatagcctagtaacattaaatacgtattccctttgtactcgagcgatatttgaagttggaaatccatcccacccggagcacgtactacgcgtaccccgggatgcatcgcagatgtcatttcgtttggtgttgagtcatggaacaaaccaaccccctgaaatcttgcttgattatattaatggaacgggccttactaaatatactggaaccttgccccaaagagttggacttgcgattgatctttatgcattgggccaagcactcttagaagttatcctgctaggacgtcttcccggacaactgcccatttcagtacatcggaccccgcattatcactactacggtcataagttatcaccagatttggcgcttgatacgctggcatatcgatgtgtcctggcgccatatatactcccatctgacatccccggggacttaaattataatccctttatacacgccggagagctgaacacccgtatttcccggaattctttacgccggatattccagtgtcacgcagtgcgttacggcgtaacgcactcaaagcttttcgaaggcatacgcattccggcctcattatacccagccactgttgttacatcgttgttgtgtcacgataattcagaaatacgctcggatcaccctttattatggcacgatcgggattggataggatcgacataagcccccagccagccaaaaaaattgcccgtgtgggaggtctacagcacccttttgtaaaaacggatattaacacgattaacgttgaacaccattttatagacacgctacagaagacatcaccgaacatggactgtcgcgggatgacagcgggtatttttattcgtttatcccacatgtataaaattctaacaactctggagtctccaaatgatgtaacctacacaacacccggttctaccaacgcactgttctttaagacgtccacacagcctcaggagccgcgtccggaagagttagcatccaaattaacccaagacgacattaaacgtattctattaacaatagaatcggagactcgtggtcagggcgacaatgccatttggacactactcagacgaaatttaatcaccgcatcaactcttaaatggagtgtatctggacccgtcattccacctcagtggttttaccaccataacactacagacacatacggtgatgcggcggcaatggcgtttggaaaaaccaacgaaccggcggcacgagcgatagttgaagcattgtttatagatccggctgatatccgtactcctgatcatttaacgccagaagctacaactaagttttttaattttgacatgctcaataccaaatctccaagtctccttgtgggtacaccaagaatcggaacgtatgaatgtggacttttaatcgacgttcgaacgggacttataggcgcgtcgttggacgttcttgtatgtgacagggaccctttaactggcaccctaaatccccaccctgcagaaaccgacatttcattttttgaaattaaatgtcgtgctaaatacctctttgatccagatgacaaaaataacccgctcggtcggacgtacaccacgttaataaatagacctacaatggcaaatctacgggactttttatatactataaaaaacccatgtgtaagcttctttggaccctcagcaaacccaagtacacgcgaggccttaataacggatcacgttgaatggaaacgtttaggatttaaaggtgggagggcccttacagaactcgacgcccatcatttgggcctcaatcggacaatctcatcccgagtgtgggtatttaatgatccggacatacaaaaggggacaattacaaccattgcatgggccactggagatacggctcttcaaattcctgtatttgccaatccgcggcacgctaactttaaacaaattgccgtacaaacctatgtattatccggttactttccagcgctaaaactacggcccttccttgtcacctttataggacgtgtgcgccgaccacacgaggtgggagtcccattgcgcgtcgatacacaagcggctgccatttacgaatataactggccgactatcccaccccactgtgcggttccggttatagccgttctaacgcctatcgaagttgatgtgcctagagtgacacaaatacttaaagacacaggaaacaacgcgattacatcagcattgcggtcattgcgatgggacaatcttcatccagcggtcgaggaggaatctgtggattgtgcaaacggtacaacgagcttgttacgtgcaacggagaaaccgttgctttgaactcagagttctttgaagactttgactttgatgagaatgtaacagaggacgccgataaatccacacaacgccgcccacgagtgatcgatgtaacaccaaaacgaaaaccttcgggaaagagctcccattccaaatgcgcaaaatgttaaaccctgataaaccctgataaacgttctaataaaaacatcaaatcatggttggttactgtgaatgtttgttttattgcttgggggtttacaagtacaacccacgctactcccacccactgtttgatcgctcgtataacagctcatcctcgcggtccgtttcatatgttgagtcattttcatagacgtagccgtagccttgtgatgggtaatttgtgcggcgagaatttctatgtgcaggttttacttttcgtatgtatccccgtacccgctcgggtactcttcttacggcaccgtagaaccgactgcgtttctgtcgatgatacacatatgcacgcatcaatctgagaagcaacatgacaacggaaaacacggccaggcaagccaaggttccccgagttgtgggaattaaccgtggagattgaaccgatatagggtcatataatcggtccatatacgagtgcgcggcggttcccaacgtagcacaggccacgagcgttcccagggacggtcctattaacacgtgtatataatgcgccaaaattaattctgatactataagatatacaactgacaatgtactaaatgtagacatggccacggacaccgatgaccacagtcccgtatgtagatgattcgccaccacaagttccagcattaatgatacaaataggatacatatcgccatcaacgcagccatcaaattcacgaacactgcgcgcgtaggccccgcaaggcgatataaaaagacgctctgctgtcgtaaatttgcgaccgcttttatgttcgtttcgtccaattttccgcgtccacaaaaatacgttgtaaatattacacttgtcgcaaaatgtccaagatataatgtagcagccacgccgatttgcttgtaagctaataataacacaacggcgtttaataaccacaatgacaaaagaccccaaaaaagtgttgtgggatctacaactaaccatgcaacaccggagctttgccggacacgttgatttttcgtttctcggtgtataatcgcggccgtgatcagtgtatataccgccatggccattgccgttaaagccgtgtagtaagtaaatgccacaacgctatgtggttccaaaaacaaaaccggggcgctgtatccacctctatttccggaccatacccccccatctagggtggcgttaaataactcataatcaactacggcagcataaaaacaagggatcccggtatattcagaagaggcggcaattaacgtagccaggagcattaccgcacccaaagtgaacatcatcacctgaattatccaaattcgccaattaagcgtatccatttgatgatctaacgcttccacctcgggtgtcgtggtgtcgtacggcgagactttttcagaacgcggccccttcttttgagttcccatgtctcccaacaccggggagagcaacgccgccgtctatgcgtccagtacacagctcgcgcgggcgttatatggaggggatctggtttcgtggattaaacacacccacccgggaattagcctggaactgcaattggatgttccagtaaaactaataaaacctggtatgtcacaaactcgcccggtaaccgtcgtacgtgcccctatgggctctggtaaaacaacagccttgcttgagtggcttcaacacgcgttaaaggcagatattagcgtactggttgtctcatgtcgccgtagctttacccagacgttgattcaacggtttaacgatgcaggcctctccggattcgtaacatatttgacatccgagacatatattatgggttttaaacgtttgattgtgcaacttgaaagcctacaccgcgtatccagcgaagctatcgacagctacgacgtattaatactggatgaggtaatgtcagtgattggacaattatactcccccacaatgagacgtctttccgcggttgatagcctattatatcgtcttttaaatcgctgttctcaaattatcgcgatggatgctacagtaaactcgcagtttattgatttaatctccggattgcgtggagatgaaaacatacacacaattgtgtgtacatacgcgggagttgggttctccggaagaacttgcacgatcctgcgtgatatgggcatcgacacgcttgtgcgagtcattaaacgatctcctgaacacgaggatgtacgtaccatacaccaactacgtggaacattttttgacgaactagcactacgattacaatgtgggcataacatctgtatattttcatcaactttatcgttttcggagctagttgctcagttttgtgcaatatttacagactctattcttattttaaactcaactcggcccctatgtaatgtaaacgaatggaaacattttcgcgtgttggtgtacactaccgtcgtgaccgttggattgagttttgacatggctcattttcatagcatgtttgcttacataaagccaatgtcatatgggccggatatggtatcggtctaccagtcattagggcgtgtacgtttattgctacttaatgaagttttgatgtacgtcgatggctcaaggaccagatgcggacccctgttctcgccaatgttactaaactttaccatcgcaaataaatttcaatggtttcctacacacacccaaataactaacaaactgtgctgtgcatttaggcaacgatgtgcaaatgcatttacacgctcgaacacccatctcttctcaagatttaaatacaaacaccttttcgagagatgctctctttggagtttagccgatagcattaatatcttacaaactcttttggcctctaaccaaattttggttgtattggatggcatgggtccaataacggacgtttccccagttcaattttgtgcatttatacacgatctcagacatagcgctaacgccgtagcttcctgtatgcgttctcttagacaggacaatgacagctgcttgaccgattttggcccttccggatttatggccgataacattaccgcgtttatggaaaagtatcttatggagtcaattaataccgaagaacaaattaaagtatttaaagcccttgcatgtccaatagaacagcctagactagtcaatacggcaatattgggggcgtgtatacgaatacctgaagcgttggaagcatttgacgtatttcaaaaaatatacacgcactacgcttccggttggtttcccgtcctggacaaaaccggggaatttagcatcgcgactataactaccgccccaaatttaaccacacattgggagctgtttcgccgttgtgcctatattgcaaaaacactcaagtggaatccgtccaccgaaggctgtgtaacacaagttttggatacggacattaatacacttttcaatcaacacggggattcgctggctcaactaatatttgaggttatgcgctgtaacgttactgacgctaagattatattaaaccgcccggtttggcgaacaaccggattcttagatggatgccataatcaatgcttccgtccaatccctacaaaacacgaatataacattgctctatttcgtttaatttgggaacaattatttggcgcccgcgtaactaaaagtacccagacctttccgggaagtactcgtgtgaaaaacctaaaaaaaaaagatctagaaactttacttgattcaattaacgtggatcgttctgcatgtcgtacctaccgccagttgtataacctgcttatgagccagcgccattcgttctctcaacagcgttacaaaattactgcccccgcttgggcacgccacgtgtattttcaagcacatcaaatgcacttggccccgcatgccgaagccatgctacaattagcgctatcggaactgtccccgggatcgtggccgcggataaacggggcggtaaattttgaaagtttataacccgttaataccatatatggacatccatagggggggttacataaatactaagcctctgtacaacacaaagggcctctaacaatgcactgaaccacaaccaagctatggacgcaacgcagattaccttggttagagaaagcggacacatttgtgccgcaagcatatacacatcctggacacagtccggacaattaacacagaacggtctttccgtgttatactacttattatgcaaaaactcatgtgggaaatacgtccctaagtttgccgaaattaccgtacaacaagaggatttatgtcgctactccaggcatggggggagtgtttctgcggcaacgtttgcgtctatctgcagggcggcgtcctcggctgcgttagacgcctggccccttgaaccactgggtaacgcagacacctggcgttgtctccatggcactgccctggccactttacggcgcgtattagggtttaaatcgttttattcgccagtaacattcgagactgatacgaatacaggtcttctgttaaaaacaatccccgatgaacacgcgttgaataatgacaacacgccatctaccggagtattgagggctaattttcccgtggccattgatgtttcagcagtcagcgcatgtaacgcccacacgcaaggtacgtcgctagcctacgcccgcctgaccgcacttaaatctaacggtgacacccagcaacaaacacctttagacgtggaggtaattacaccaaaggcctacatacgtcggaaatataagtctacgttttccccccctatagagcgggaaggccaaacctccgatttgtttaaccttgaagaacgccgcttggttcttagtggcaatcgcgcaattgtggtaagggtactcttaccgtgttattttgactgtttaacaacggattccaccgttacatcttccctttcaatattagcaacatatagactgtggtacgcggcggcgtttggaaaacccggggttgtccgtccaatctttgcgtatttaggcccggaactcaatccgaagggtgaagacagagactacttttgtactgtcggatttcccggatggaccactcttcggacacaaactccagccgtcgaatctattcgcacggctacggagatgtacatggaaacggatgggttgtggccagtaaccggtattcaggcctttcattatctagccccctggggacagcatccccccttacctccgcgggtgcaggatcttattgggcaaatccctcaagatactggacatgcagatgcaactgtcaattgggacgcgggccggatatctaccgtcttcaaacagcctgtacaactacaagatcgttggatggcaaagtttgatttcagcgccttttttcccacgatatactgcgctatgttccccatgcattttagattaggcaaaatcgtcctggctagaatgcgtcgaggaatggggtgcctaaaacccgcgttggtgtctttttttggggggttacggcacatactcccgagtatatacaaagctattatttttatagccaatgaaattagcctttgcgtcgaacaaacggccttggaacagggctttgctatatgtacttatataaaagatggattttggggaatcttcaccgatttacatacgcgcaatgtatgttcagatcaggcacgttgttcggccttaaatttagcggccacctgcgaaagagcagtcacgggcttattacgaattcaactaggtcttaactttacacccgccatggaaccggtactccgggtcgagggtgtgtacactcacgcatttacctggtgtaccacgggaagctggctgtggaatttacaaacaaacacgcctccggatttagttggcgtgccatggcgaagtcaggcggcgcgagatttaaaggagcgtctttcaggactcctatgtaccgcaacaaaaattcgagaacggatacaggaaaattgcatatgggaccatgtcctatacgacatatgggccggacaagttgtggaggctgccagaaaaacatacgtcgatttttttgaacatgtttttgatcgccgttatactccggtatactggagtcttcaggagcaaaattcggaaacaaaagcaataccggcatcttatctgacatacggacacatgcaagataaggattataaaccaagacagataattatggttcgtaatcccaacccacatggacctcctactgttgtttactgggaattgctaccatcgtgtgcctgtattccccccatagactgcgctgctcatctcaagccccttatacacacgtttgtcactattattaaccatcttctagatgctcataatgatttttcaagtccatcattgaaatttactgacgatccccttgcttcatataacttcttgtttttatgacaaaaaaacacgccgcaacaacccatccttaaaataaaaggtttatttactttacaacccgtggtgaatttttatacgtttcaaataactgaacatttttcggtgttaccatggtgcgatttaaccaccaaaaatatacgctcttctgatattccgaatctcgtaaaggtccatttaacaatcccgggggtacttgcaccacaccatctggacaggggggggttccgtggggcaggtcaaaacgctgacccaccccacatgaatatatagcctttataatattgggggccgttccaggctgagggttcagtaacttaacaaacatataatgcggcaatacgcgggtttttgtaaaggggttgttatcaacgacatacattagagtgtttaacaaccataaaactccctcatataaaaaccgacgcattttttccaaaggtcctatttgacactcaacgcgtctaagatatacagacaattgtacaaacagcgatggagatgccccggagggcccaatgccttccagatacattaaaataacacataaggtaaaatctaggacattatccgggcggaatagagtcatccgatagattaacaggcgcggaggcacccccaccgtatacaccctatcttcaaccgcagttaatacggaaaaaataaatccgcggaacgctggttgagtaacacactccatgtagtaacgatcacaggacacctcacttgaatcaccattcaacactactaaaacggtctcttggtgttccggttttacgcgcagtgatacaacagagtttgccaaaaagcgtggcttcaaaccggttacctcccgcgcctcgcatacgaatcttggtattgcttgtattctaagatcttcgatcacgtcgctcacatccaacccctcttcggctcgtgttagtaagttgtcgatcgttacgctgcaacctaaaatgctgggtatatttattccggacatcccatcggccatccccgcgcctccggtttgctcgaattttatccagtaaggtcgaatccgctgcatttaccttgtgtacccgtaacctctcaggggggtgtcctttcataaaatgggataggtttttatatccaacatgcatgtattggttatttattttattgggttccgggattctttcgtcatcttctgtagggtcaggcaaaccccaggaaggacttggtgttctccgtgggccccgttttattacctctgcgcgaacctgcatttcatataatattcggatttgggataaataggactctgttctcgcctttttaaaaatagcctggcataactcttcctctgacctatgtacctcgctttgagttaccaagaatcctaatcgggtggcccgtaatatgaatgaaaaatacggcgcaactagtaatgagattgacgcatttgaatatgatacagaaatttcctggccttgattattgtttacccggtgaagcttaaaacagcgaacaagttcctgtttccatagctcagacaaacgttttatatcatctccataaggggggatataacgagattgaaaactattggcaatatatgcatcatcccctattatgccggtaagatctataacctcgtgatttaaatcggcaatacgtgtttcttctgccattgtaatatgtgaccctttagatggctttatttttaccctctcttcccgtaaccgtttcagctctccttctttgaactggagcctttcggtcagatcgctgttcacatccttgagaccctcaatggttttgaataaattattcacataaccctcgagcatgccgttgatactgttaaccaccgaagttttaaacgcactttgaacgtttgttgttccggacattgcccccccgttaaaggattggttggccttgccaaaccccggttgtgatgtgtccaccgatccacttccttccagaatgtgattgcccgtttcttctagataggaacgtacggtttcggtaatatctccaacatgtctcatgttttttaagttaactattagctttacaagtctagacgcggccgatccagcccgtgttgtatcgttctcgcccattatacgatcaaccgcacgtgtgctgtgagatctatcatcttcattccggcgacctattaacacgcgcaaaggggctgtatttaaaacttggcagacgcgagcatgttcacgtaatgcataacaggccaacacctccccagaaagccgctgtaagggtgagtcaaatactacaccctccccacatacaacgggcggccacacgaccaaacactctcccttcatgcccgttacatcatcctttgccataattaatcttcggttataattataataaagacgcgtcctatcataatccataatagcaacattttgcatacactcaactaggcttgtgacaaccgccgctcctctggccaacgttgcatcggcaacttttaacatctgggacagttctgccgcttgacccatatacgtatttaatggtgcaggggttccattctgttctgatcgtacctttcttacaacgggcacaatacctacacaggctatccagtccacgtatttggcaaaaccgacccttccatttaaaccactggtatagagacaaccggttattccacgcagaaactcaagtaacgatgactgtaatgtttgacgccaggtttcaaaaacctgatgtgcaagccgtacggcttctgattctccacatagcccataacgttccgctagagccccggcatgcaggttacattgttggatgtggtgttcccaatctgctgctaggtcctcataccgagttgcatccaacgcgttcatcaaaacggttgcctgaacttggcgaattacagtttccgtagaccgtacagcgctatatatgccttgtccatcggtatatccaaagtcaccggctaggatttttcgaaacaacatactttgcgtggttgggtgtattaacatccagccatcttcctccggaaatgtacaaaaccctatatccggggcgtactcattccagtatatatcgaacatgttcttgtattggtcatttgggttacttccattcaagccctggtcaatagaaacagaacttgctatccttttttcttcactaccggaactgttattaaaaagagacgttatttcggccattgaaaaccacgatgaaaagatcaatttctgtagacagttcttcacccaaaaacgtttttaatccagagacgcccaatggatttgatgacagtgtatatttaaacttcacctctatgcatagcattcaacctatcctctcacggattcgagaacttgccgcaattacgattccaaaagaacgtgttccgcggttgtgttggtttaaacagttactcgaactgcaagcgcctcctgaaatgcagaggaatgagctccccttctccgtttatttaattagcggaaatgccggctccggaaaaagcacgtgtatccaaacgcttaacgaagctatcgattgcattattaccggatccaccagggttgctgcccaaaatgttcatgctaagttatcaacggcttatgcgagtcgtccgataaacacaatctttcatgaatttggttttcgcggaaatcacattcaggctcagctgggccgttacgcatataactggactacgacccccccttctattgaggacctgcaaaaaagagatattgtatactactgggaagttttaattgatataacaaaacgagtgtttcaaatgggggacgacggtcgcggaggaacatcgacatttaaaaccctgtgggcaattgaacgtttgcttaataaacctacaggctcaatgtccggaaccgcgtttatcgcatgcggttcccttccggcttttacccggagcaacgttattgttattgatgaagcaggattgctagggcgtcatattctcacggccgttgtttactgttggtggcttttgaatgctatatatcaaagccctcagtacataaacggtcgaaaaccggtcatagtatgcgtcggttcgcccacccaaactgactcgttagaatctcattttcaacatgacatgcagcgttcacacgtaactcctagtgaaaatatactcacgtatataatctgcaatcaaactctgcgtcaatatactaacatctcacataactgggcaatctttattaataacaaacgatgtcaagaggacgattttggaaatcttttaaaaacgcttgagtacgggctacctattaccgaagcacatgcgcgtctggtcgatacatttgttgtacctgcatcctatattaacaatcctgctaatcttcccggatggacgcgtctgtattcgtcgcataaggaggtgagcgcgtatatgagtaagttacacgcgcatttaaaactatcgaaaaatgaccatttttctgtgtttgccttaccgacttatacattcatccggctaacggcatttgatgaataccgcaaattaacgggacaacccggactttctgttgaacattggatacgggcaaactccggtcgtttgcacaattattcccaaagccgagatcatgacatgggaacagttaaatacgaaacacattcaaatcgcgacttaattgtagcccgtacagacatcacttacgtgctaaatagtctcgtagttgtaaccacaagactacgtaagttagttattggattcagtggtacatttcaatcgtttgcaaaggttttacgtgacgactcctttgtgaaggctcgaggagagacatccatcgaatatgcttaccggtttctgtcaaacctaatctttggaggcttgattaacttttacaattttttgttaaataaaaacctacatcccgataaggtatcgttagcatacaaacggttagctgccttaaccctggagttattgtctggaacaaacaaagcccccttacacgaagcagcggttaatggggcgggtgccgggattgactgtgatggtgcagctacttctgccgataaagccttctgctttaccaaagcccccgagtccaaagtaacggcctccatacccgaagacccggatgatgtaatttttacggcacttaacgacgaggttattgacttggtatactgccagtacgaattttcctatcccaaatcatccaatgaggtccatgctcagtttctgttaatgaaagctatttacgatggtcgatatgccatattagcagagcttttcgaaagcagctttacaaccgccccctttagcgcgtatgtcgataatgttaatttcaacggaagcgagcttttgatcggcaatgtgcggggggggctgttatctttggcattacaaacagatacgtatacccttttggggtatacttttgcacccgtgccagtctttgtagaggaactgacccgaaaaaagctgtaccgcgaaactaccgaaatgttatatgctctacacgtacctcttatggtcttacaggatcaacatgggtttgtgtccatcgtaaacgctaacgtatgtgaatttaccgagtctatagaggatgcagaattggcaatggccaccacggtggactatggccttagttctaaactagccatgacaattgcacgctcacagggtctgagtttagagaaggtagctatctgttttacggcggataaactgcgcctaaatagtgtgtatgttgccatgtcgcgtacggtctcctctaggttcttaaaaatgaatctaaaccctctacgggaacgatatgaaaaatccgcagaaattagcgatcacattcttgccgctctacgtgatcccaacgtacacgttgtgtattaaagcattgtataaaaacacgcatgcgggcttgctgttctcatttctaggttttgtcttaaatacacccgccatgagcatctctggacccccaacgacgtttattttatataggttacatggggttaggcgggttcttcactggactttaccggatcatgaacaaacactctacgcatttacgggtgggtcaagatcaatggcggtgaagacggacgctcgatgtgatacaatgagcggtggtatgatcgtccttcaacacacccatacagtgaccctgctaaccatagactgttctactgacttttcatcatacgcatttacgcaccgggatttccacttacaggacaaaccccacgcaacatttgcgatgccgtttatgtcctgggtcggttctgacccaacatctcagctgtacagtaatgtggggggggtactatccgtaataacggaagatgacctatccatgtgtatctcaattgttatatacggtttacgggtaaacagacctgacgatcagaccacaccaacaccaaccccgcaccagtatacatcgcaaaggcggcagcctgaaaccaactgtccttcttcaccacaaccggcctttttcacatcagacgacgacgttctttcgttaatattacgggacgccgcaaacgcgtaaagacagattcaagactaacatttatcccaactgattacatttcatacgcgaataaacgacacaaaaaatttatatttaacggcttttaatttgaagacacctatcctcttaacgttgatgagccttgcaggttgggtgccgcgcttcaccggtattatacataaccgatttaccgtgtttacggcagtctgaccatttaccagtgtatgtctgtaatacgacgttgttgtgtcccgacaaaattaactcgcgtacaaatttctgatgttcccccggcgtggcaacgctggcatttccaaacacattacgttctcgtacgtccatgaccgctattttcagtattaattggttggtcggtcaaagtattttccttatgtaaaaggacacgatctaaagccgtaaactcatacacaaacactggtaccaacggacgcgattttccgtccgttgagcgggtgtaatatcggcgaggtcttcttgcacgaatactctcgtacagtaggtttctgacacggggtgcatgggttttttgacacaacacaaacatttgcaggctcttatgactggatggattgaatttatttttagatagggtcacgtgtttttgtcgtgacacgcctcgaccagaaaaggctgcggttttcgtacacgcgaccgttatttcacaggcgttcataaccaagctgcggcggatggtgtcggttaattgtctccgcccaagttcgtcaatagatgataccatgaacaacgtatcaaatggtacatagtcgtctttggttttctcaatacagcccgcgtgcccaatcggaaatttttcatttgcatcaacgctattttctgtaaaatcgttctgaacactgtgttggctggctacctgtttaaaatttgggatcgaacacggtccacgatgcaatccccaaccccattgaagcaatgccgtcggtacggaaggaggcaactccgaaaacattatggtacgcaagagggtcgattggagtgttatataacactccaatcgatctcgggttcgcctttacgcgtaaaatactcattggcttgaacgaaatgtcgacaattccgaaatggaacacgggacaatggcgacggatgcgcgtgtgttagcaccagatgacatcttgaattcggttgggttgtcttctgtgcatgcgcaccccacagcataaaaactaaccctgtacggttctcgcataacctctgtagcacgcgttgcaccagccgcccccagcctaagtatacatgcgaccccggagtcccgcgacgaaccgtaagcgtggtattcagcaataacaccccctgccttgcccaactctccaggcatccgtgagtgggcggagtcatatttgggtatgattccatgagggccgcaaaaatatttttaagactagacggtggtgttatgccacgttttacactaaacgctagcccatgtgcatgtcccgcggtagggtatggatcttgaccaataattacaacgcgaatgctctggggtccgcaaaatcgcgtccatgcaaaaatatcgcctgtagatggaagtatttcttcccctgaatttaaaagacgattgtattctaaaaaaatacctttcgcgtacggctctttaagttcgtccgacaacaggtcataccactcaggggaaatgttaaacttgctgaaaacttcaaccgaatccagttgcgaagagacgggggtgaacgtttccgtgtcgtaatgatgtgacatgttatttaacttgaaggttggggggtctagcttaacccccaaaggcagcccgcggggtcgcttgcgggtttttttggtaaccggatgggccaaaacataaatgtcctttgaatccgatagtttcatttcattggcatacgcgttggaacaaacggtcggctccccagacacatccattttccgggatatttgtggaagatggagtagagtctacccatacaccggaaagggcatccaacaaagcatcgcgtatgtccccgcttttatgttcttcaccaacagattgtgccagcccctttaaggtgacgtatggatttgtccagtacgccatttgtttgtctttaaaccaaagtataacttccggtactggacattttgtcttaaccacgattcccgatagcgcctcgctgaggtttgataccgggggtgccgcatagtcccacgcctcatataccgatgacacgcacggttccgttataatcaaactcacatccgatagcggtttggctccaaaaaacaacggagtgtcgtcttggagatgaagacaatacgcgattgtgatagtttttaaaaaaactatctgcagtaaccatttatgtgatgccatgacgcttgtgttttcccttcactacgacgttgtcgtatcctttgaaaaacttgaccactctaatggaagcatggacaagtatgagttttatatatacagttggcctttagttaaactcttggtgtcatatctcattttcctaaaaagggcgatcttaatatgtcaaacgtcacggcgtgccgacaaagcgaatttccatgcaagatttggatgtagtatttatacacccaatcacatgtcacgtattaagctttacagtcccccgttatctgatataatcacttttcttaacacgtcatcgggaaaacagatgtttatattatacctctcgcggtcatttacggcaaatacttagaccgttttcaagcggactgaaaacgctcaaattgccttttggaggcctgcccaacggccattatcccttggatctaagattgatttgcggtaacgtttgccaatcaagctttaaaaacgtaccccaaacttaaaacgctcaaattgccttttggaggcctgcccaacggccattatcccttggatctgagattgatttacggtaacgtttgccaaacccacgcatttcagtttaaatatttctaagcattcttagtgcgtacttggcagcgtgcttaaaatatcaaccaatatccattatgctacacgtttccttctatccgtttcaatccattaaaagtccattaacaaaaatgatgcatcatacctaattcacctaaaaacctgactcattgcagcagcgtttcctccttgcagactatccagttggcattttaaacgggtccggctgcctaaaccgaaaacaccgttgcctttactgtaagtacaaaactaaaatttatatttgcgtgcgtattttgtaacatatatgccttttatccccccgcaagtttgctttaccctcgccttcaccacccccgccaccttccggccattttaataactttaattgctataagacatacccaaaccggatgatttttgccgctggaaaaacagcttctaattttcccgtctcaactcggccttggttgcatctccaagtatacctttagtttgctcccgtagaggtgtataaatacaaacggtgacaagtattgagcgtaatctcaaatttttgtaatttagggcggagcgcttacgacagcacatgcgtactgttagactgttatgtttattgtatttgcagagcaggatgccccggttactccgagaccggattgcgggcattccgaatcgtgtacggacttaccagggggcagtatttacaccttgggttccagatataccaacccttacgaccaatagcaacactcaggtatttttaaaatgcacgtttaatgatcataatttacatacagttggtaataaagcagactgtggatgtttaaggcatttccttccccctcccaacaaactaggacttcttcatcttgtttggaatacctttacccgctttaccggcagagctttttttggtaaggtgtttcagtgaacctgatgttgatccggaggtggagggggtattggactccccctgtggagaggcaactttgcgggttttacttcccttacatgccgaatcagactcagatgtcaggtctattgttaagcatcgtttaacgtctctgccggtatgaaataaacggcgcttagcaccccttgcgcttcccggtttaatccccggtaacacagaaaaaagcctgactttttggggtgtatttaccaatcgggtatccctttcatcgccacgagaggtctccccggttgaggtggtttctggtcttacaattggacctgtaattagttggatggctgtatctttccaggtccaggtttgcatggttaggcgggttggatcggtacatcgatccaacaagaataacatgtttgttacaaacggtcctgttgaatcatgcaaaagacaacgcagggatgtttttaatcccgcctcatcacgcccgtaaatacctatatagtttaatatcaacatttttgtaggctctacaatttcgggttgatacagttccgcaagttgatcatcaagccatccgagtaaaggttgcatgtaacacgggaatctcgcgtttccctctgttcctctatccgtggctcgaaaaggcagtctgtccatggttcgtgggtcttgattaattcccacagatactggacgatcacggtagtcctgccccccggtccggggttgctgtgcagattcaatcgagccatacaccaccggggtcgccgatcgaacagcaggttggtctttaaaaaataccttccgtaaaaatgatgcggtagagcatgttttggttacaccagggctcgagtctcgggtcggtggttgtatagaatcctgttgagagtcacttggtgactctgctgtgggctctctagccgacgattgaaggggcccagggtttggtgattgaatgggctcccgactcgatcttgatgttggctgttggatggactcccgactcggtcctgggcttggtggcagaagatctatgacatctcccggtaggatgtcgatggaatcttcaaatgacggctcagaaaaaccatcgtcgtcggatgggtgcacttcatattccttgtaacttgtatcacttacgatcttatgcaggatggattgcactggacaccggcagagaggacactggacgctggtggaggtccatgcccgaatacaaacaaagcagaagtcgtgcaaacacggcatggtttttccgagatcggaaacggtgctcatgcatatggtgcaggtattatccgaagcgtcggaggtgccgctaccgcccgctaatatggtatccatggtaacaactggctgtattctaatgtccgggcatccaaacacgtagcagaactgccatgcgttctaaattgtgagttgtggcgagtacatttttataattggtaccaacgaagacacacccctatatccctccacccatttcttttaagtcccacccactaaaacgtgggtataaaatgtgtattggggtaggcggacagtcccaacaaacagggaagttgattggtataaccttgggccgggtatacagctaagtgacattttagattctgtctttatttagataaagagcgatacgaagacatttctccacccccctgtaatacccgtaaataaaggtaagtccacaaacaaaagcactgtatataggaagtcgggtgtattgggacagttactccattagaggcgtacaaacaatactgggatagggtaatgcaagtcccccccgatggtcgccccgcaaacgcgcggggaggtggggtcgcttttttttttctctctcgagggggccgcgagagggctggcctcctctcccggggtccgccgggcgcccagaaaccgggggggggttattttcgggggggggtccgaccagcccgcccgtcgcccgcccgcacagacagacagacacttttttcataaaaaccgttccgcttttattaacaacaaacagtccgcgcgccagtggcgctcacgagaaaaggaggggactccgtcacccccgactctgcggggggctcctccccccgcgccctccccacacatcgtcctcgtcctcggaggacgaggacgaggacaacagctccaccttgaccgccgggcgcaaacccacccggcggtctcgcagcacacccggggccaccgacacgatgctcaccccaaaggatgaccccggtgcgtccccgtcgtccccgcccccctcctcgctgtcccacgcgtcttcacaccccacctcccaatcgtccagctccaaagcgtgttctctgtcgtctgcggtgcgccgctgtcgccccgcctgggtttctgacggccgttccgagcccccgtggtgtccgaacacgaaccgtgttccgtcgctcccctccaacaccgtctccgcggccccaaaaccgggcggccacattactctgggaatcggggggagggcattccgagcctcgtccgccgacgcatacagcgccaccgaccgaccggccacgggtggaagcacgagtggttctgcggcagggtcgggttccagcagggcgtggcggcaaaacaccctcgcccaggtgggtacgtcgccggcctccggcccggcggcccccggtctccgtccctcgggaaggaagacgggtcgaagcgcggcacccaggccccatcggtttgctgcgcggtggctatgtgccgcctcgtccacaaagtcggctgccccgagccccagaccccgagactgtcgcgcgaggtccttgcaaccgtcaaaacccggcagcacgtactgccggtattcacggggcgacagggggacgcgggtcttggggcccgcgcgggtacacacggtgtatgcgacgttcccaccgcggcacaaacacaggggttgttcgcccgggtacaggttggcaaacgcagtctcgatacgagcaaaactcgctggcccaaaggtgcgcgacgatgcaaacacggcccgggcgagtccttctgtgaccgccgagtctggccatcggacgacggcctgggcgtccggtcgcgccggggcccggacgtacacgtgatactgagacaaagcgggtccatccctgggccacctctcgagggccaccgcgtccaacaccagcaaccggcgccgggcagaggccaaccgcgagcctagatactcgacggccccggcaaaggccaggtctcgggtcgacagtaataaaacgccccgggcgttcaaagcggacacgtccggcgggccggtccagttcccggcccaggcatgagtgctcggcaggcacaaccggttactcagggctgccaggaccacagacagtccccctcgggatggactccatgacggtcccggatctgtcgcgagggtgctctcgagggggccgttgatgtcctctccgggcaacggatcgtagatgatcagaagcctcacatcctccgggtctgggatctgccgcatccaggcgcacctccgtcgcagcgcctccactccgctgggtggaccaaaccgtcggtctcctccgcccggacgccgagcggcgatttccgccaaggcgccgggatcaaagcttagcgcagggcgccaggccgtgggaaacaatgggtcgtcgaccagacgggcgatggtttcgggggtacagtacgccttgcgagcctggtccgacgggaccggggtatgcagggccccccggggaatacgccgaaatcccccgtttggggccggtccgtcaagtggcatcgttattacggcggggggatccaccacagggcccgaggtgatggtcacgggctcggatacccgcctcttggccttggaaaccacatgatcgtctgcaacccgggcgtccgcgacgggtgtctccctaatcttgtcgaggaggcttctgctctcgactggctgggacttgcgcttgcgcggagttcgtaaacgatcatccggtggacacacagaaagagagcgtgcggcggccgacggctgagggtcgggagcctgtgtggccggggttgttggagaagggtgaccgcgggagatccgcgccgccggactggagcccgttgcctcggggtatgccatgctggcaaaggctctgcggagactctgtaggataaagtgtttttgggcccggtcgtatcgacggctcatagccacggccgcggccgcgtgggggagagcccagagggcctcccccgtggccatggcttcgcctacatgcggaacgggagacgctacgctccccgtaacggcggtacccgcccgtcccggtggcaacagcttttggtagaactggttcagggccgagttgacaccggtcagcttggggttctggagccatgctatagggtctctgtctggacagtagatcaggttaatcagcgcgcggtactgtctagccggatctcccaactccggcacgtaaagcggcacgggttccgttgaggcctcgtaacgagcccgcgccgctctcacagcctcatcctcccagtgaccctctctggtctccccggacggtccaaaccgcaccctgttggatgggaggggtgccgatccgggccaagggcttccgtcgggcatcatgagcggccccgacaccgggggaattatcggggttctggatcgcggcagggaaaatgatttctgtctctggcgccccggttcccccgcaagacgtttggtcttacgaatcctcggatcgggaccgctgatggatcgatatcccggttggatattttgtttcgtcgacccaccatcatttgagtccgaatcatccgaatttgacggggaaggggcgtgttcgcgtccggacctgctgcctgtagtttcacttcccaccgaaacgcgccggggttcatcgtcttcatcctccgatgacgatccccacgacgaggaagaggatgaagacgaaacaaactcacgactctttggctttttctccactgggctgtcatcctcaatcgggtctggtgcgtgggatcttcccggcagggccaaaaacgctctaggtttgccccccgacgaacgtccagggacgcgaggtgttataccccgggcatcatgtttccttgggcgggtatcatcggtctcaaacggcaggtccgcctttgcccccttagcgggaacgctgtccgaaaggacgtggtacaattgctcaaccgggccgggtacaggtccaccgggtttccgcgccgggagtgggaccttaaccttcaaagtctttttcttcgggctctttccctgagcgggccgttgagttttctggagaactactccgtcccccgatgcatgcgcatgacccgcttgctcatcgcccggctttttacccgagatggactgagtttgtctgtctcgatggaccaccgacggcaaacctggtgaatttcctctcgtcgtttgtcggggtatagaccgctggtcttcccgttgatcgttcccggcggcgtctccaacaggagacgcgggggatacaggggagaaggcctgcgggaacggaggggtcgtacctctgcccgtttccccatcgttcatcggtggttttggagacctagcaagcttcgttccgagagagactgtctcaagggagcgatcggctcctgttggttctcgcgcgccggcctccgagaatcgggtgtggaagacctcggccagcgggattacaggcgagcccattagatcctgaccgtcctcgcatacgtagtcgtcttgtgttagctcttcgccaacatcttccgttctgggttctggttgaagtcccgatacggagggaattgaaacgatctcgtgttcccgtcccaccatgaccccgttctctccaaatagtagatcgtcaggctgactcgaggtgaccacccgggccctgtgttcggcggccgccgcggccgcgtccaacaggtccattaactccaaagtatcaggcgaccccgcgcgttggggtgtagagcgctgcatcggcggcgtatccatcgcactggggtgaatttagacgtacccgagttttccaaacgctctcgcagccttcaaaggattgcgattgcggttggtgagggagttccaacagtacttaaaacgtgttgtgcccccccctcgaccgcatatttcctccccgtgtcgtcaccgtgtaaatattcttaatgataagacgatgtagtgattggacgagactcgaggcgggaagttcatggaccatagtatgcgtttaaggagagaccgctggttggcgatgtacgcccggtgtctatttccgcataccttacaacatcataacaagggataccagacatgtgaatttcatttacatatgtttaaataacaaccaatcatcgtgtgtctacagacgatatataatatacataaacacaattggggttgtctcacatgcaaaacatcttatataacacgggttgtttccacccatccggcatctagttaatcaaatgcacgtcgacggtgtgtttgggtccctctccgtcgtcattacgttcgcgcaatcaacaagcgtatacaccaccacccctcccaacgattatgtcaggcggcacgaagcccgcgataacccataaaatacacacggggttgtggtgttcacgtaaccccccgccgatggggagggggcgcggtaccccgccgatggggagggggcgcggtaccccgccgatggggagggggcgcggtaccccgccgatggggagggggcgcggtaccccgccgatggggagggggcgcggtaccccgccgatgtttataaccataattctctaaaccgttgtagaaaatcacaaaaaaatttattcaaaaacaagtcgaagaacttcatatctgaggcatgtaaacccgttcgcacttcctggggtggaatggggtggggtgggggggtgaaaaagggggggggttaaattgggcgtccgcatgtctgtggtgtacgccaatcggatacactcttttgatctgcattcgcacttcccgttttttcactgtatgggttttcatgttttggcatgtgtccaaccaccgttcgcactttctttctatatatatatatatatatatatatatatatagagaaagagagagagtttcttgttcgcgcgtgttcccgcgatgtcgcggttttatggggtgtgggcgggcttttcacagaatatatatattccaaatggagcggcaggctttttaaaatcgatttgacgtgataaaaaaaaacacacggggcccccccctttttttggtgttataaaggcaacccaatcgaaggtctcccgccccggaatcccccattgccattttacccaagtagccttattcatagatgtaaacgtttgggtgtgtgttttgttgtgcagggttcgtccgattcataacgcgacagcgtcgagtcggttttaagggaaaaggttactacggccccaaggacatgttttgcacctcaccggctacgcggggcgactcgtccgagtcaaaacccggggcatcggttgatgttaacggaaagatggaatatggatctgcaccaggacccctgaacggccgggatacgtcgcggggccccggcgcgttttgtactccgggttgggagatccacccggccaggctcgttgaggacatcaaccgtgtttttttatgtattgcacagtcgtcgggacgcgtcacgcgagattcacgaagattgcggcgcatatgcctcgacttttatctaatgggtcgcaccagacagcgtcccacgttagcgtgctgggaggaattgttacagcttcaacccacccagacgcagtgcttacgcgctactttaatggaagtgtcccatcgaccccctcggggggaagacgggttcattgaggcgccgaatgttcctttgcataggagcgcactggaatgtgacgtatctgatgatggtggtgaagacgatagcgacgatgatgggtctacgccatcggatgtaattgaatttcgggattccgacgcggaatcatcggacggggaagactttatagtggaagaagaatcagaggagagcaccgattcttgtgaaccagacggggtacccggcgattgttatcgagacggggatgggtgcaacaccccgtccccaaagagaccccagcgtgccatcgagcgatacgcgggtgcagaaaccgcggaatatacagccgcgaaagcgctcaccgcgttgggcgaggggggtgtagattggaagcgacgtcgacacgaagccccgcgccggcatgatataccgcccccccatggcgtgtagtctttataaataaatacaatggtttggctcgtgtctttttttgatgtctgtctgtgggggagtggggtgttgtggatattagagggtagagggtgctggtttgaacgtctccattaacccacggggtccccacacgggccgtgtggtatgaatctctgcggatcccgcggtgagcacccgggcggtgaatatgccggactttactgcacacgacacgatacccccgcgcaccaggctctcatgaacgacgccgaacggtacttcgccgccgcgctatgcgccatatctaccgaggcctacgaggcttttatacacagcccctccgagagaccgtgcgcgagtttgtgggggagggcaaaggacgccttcggacggatgtgcggggagctcgcagcggatagacaacgtccaccctcggttccgccgatccgcagagcggtgttatcgttattacgcgagcaatgcatgccggatccacaatcgcatctggagctcagcgagcggctgatattgatggcatattggtgctgtttgggacacgccggacttccgactattggattgtcgcccgataataaatgcatccgcgccgaattatatgaccgccccgggggaatttgtcacaggctttttgacgcgtacctgggctgcgggtcccttggagtcccaagaacctacgagagatcctgacaccccatccctttatatagaaaaaaaaaataaatttaaaacatacaccggataaaagcgtactgttttttatttaaatttacacgctcggcgttgccccggttcggtgatcaccgggtcttatctatatacaccgtgtaactcgaacccccgtgactccctccaatcgcgttaccaaactcttcttccgtatccgtagattccgagtcctcgaaatcgtccacttatccaacaaattgtgacgttatatatcccaaggcaaaggccgctcccgtcatagcaaatacaaagacaattattagcgtaatataacagaattttttacgatgatatattttatgttgatattttccaattcgacgcaaaaattcatctgccgtttcattttcgctatcactataataacacttttcagccgaacggctcggttgtatggctgttatcgttgtattatttggttgcgctcgcggggttaccaccgcttccatcagtaaggccacggcctcaccctccatggtgttttgtccggccatagaaatccagattgtaaggccagcaggctagtttaaaagtgtttaataccacaccttttgatatttatatacatgcaagattctagattattcatcaataggtcgtttaaagcgcgttttcataaacgttgtcagctataccgacattctcacaaagaggtaaagttaccttacgttattattaaataaaacatgtagacattattaataatcctaggaacaatcaaatccatatttgtaagttatgtttaacccctcccctttttgtcattatctccgccctcttataatcggatcactttataagtgtgtcggtgagtatattttgtacagttgttggacaacaggtttttggttcattaacactatcaacataagtcggggtatacaagtataatgaacgacgttgatgcaacagacacctttgttggacaaggaaagttccgtggcgccatctcaacatcaccgtcacatattatgcaaacatgtgggtttatacaacagatgtttccagttgaaatgtcgcccggcatagaatctgaggatgatcccaattatgacgttaacatggatatacagtcttttaatatatttgatggtgtacacgaaactgaagccgaagcctctgtggcattgtgcgcagaagcacgcgttggaattaataaagcgggatttgtaatattaaaaacgtttacaccaggggcggaaggttttgcgtttgcgtgtatggacagtaaaacatgtgaacatgtggtcattaaagcgggtcaacgtcaaggaacggccaccgaggcaaccgtgttaagagcgttaacccacccatccgttgtacagcttaaaggaacgtttacgtataacaaaatgacatgtcttatattaccacgttaccgaacagatttatactgctatctagctgcaaagcgcaacctccccatatgtgacattttagcaattcagcgatctgtattacgcgcgttacagtatcttcataataacagtattattcaccgtgatataaaatctgaaaatatatttattaaccacccaggtgatgtttgtgtgggagactttggagcagcgtgtttccccgtggatattaatgccaacaggtattatggctgggctggaacaatcgccacaaactctcctgagttattggctagagatccatatggacctgccgtggacatatggagtgccgggattgtattatttgaaatggctacaggacagaactcgttatttgaacgagacggtttagatggcaattgtgacagtgagcgtcaaattaaacttattatacgacgatctggaactcatcccaatgaatttcccattaaccctacatcaaatcttcgtcgacaatacattggtttggcaaaacggtcttctcgaaaacccggatccaggccattgtggacaaatctatatgagttgccaattgatttggagtatttgatatgtaagatgttatcgtttgacgcacgtcatcgaccatcagcagaggtgttgcttaaccactctgttttccaaactcttcccgatccatatccaaatccaatggaagttggagattaaaattcattaagcctgttaataaaatattgtataaattgtgtttataacgtataacccgttaaggcaaatagggtacaaacgcgcaatgttttgaaatactaatataaataacataaccaatagaaacttaatacagagtcacgccccattacaacaaggataaaacacgggatcattttcttaacattgtagtagcgctgaaaagcgtcccctcccccggctcacagagctgctcttcggtgtagttgggtatactggtgcgcctcatttaatcgcgatgtttttaatccaatgtttgatatcggccgttatattttacatacaagtgaccaacgctttgatcttcaagggcgaccacgtgagcttgcaagttaacagcagtctcacgtctatccttattcccatgcaaaatgataattatacagagataaaaggacagcttgtctttattggagagcaactacctaccgggacaaactatagcggaacactggaactgttatacgcggatacggtggcgttttgtttccggtcagtacaagtaataagatacgacggatgtccccggattagaacgagcgcttttatttcgtgtaggtacaaacattcgtggcattatggtaactcaacggatcggatatcaacagagccggatgctggtgtaatgttgaaaattaccaaaccgggaataaatgatgctggtgtgtatgtacttcttgttcggttagaccatagcagatccaccgatggtttcattcttggtgtaaatgtatatacagcgggctcgcatcacaacattcacggggttatctacacttctccgtctctacagaatggatattctacaagagccctttttcaacaagctcgtttgtgtgatttacccgcgacacccaaagggtccggtacctccctgtttcaacatatgcttgatcttcgtgccggtaaatcgttagaggataacccttggttacatgaggacgttgttacgacagaaactaagtccgttgttaaggaggggatagaaaatcacgtatatccaacggatatgtccacgttacccgaaaagtcccttaatgatcctccagaaaatctacttataattattcctatagtagcgtctgtcatgatcctcaccgccatggttattgttattgtaataagcgttaagcgacgtagaattaaaaaacatccaatttatcgcccaaatacaaaaacaagaaggggcatacaaaatgcgacaccagaatccgatgtgatgttggaggccgccattgcacaactagcaacgattcgcgaagaatcccccccacattccgttgtaaacccgtttgttaaatagaactaattatcccggattttatattaaataaactatatgcgttttatttagcgttttgattacgcgttgtgatatgaggggaaggattaagaatctcctaactataagttaacacgcccacatttgggcggggatgttttatgaagccttaaaggccgagctggtatacacgagagcagtccatggttttagacctcgggcgaattgcgtggttttaagtgactatattccgagggtcgcctgtaatatggggacagttaataaacctgtggtgggggtattgatggggttcggaattatcacgggaacgttgcgtataacgaatccggtcagagcatccgtcttgcgatacgatgattttcacaccgatgaagacaaactggatacaaactccgtatatgagccttactaccattcagatcatgcggagtcttcatgggtaaatcggggagagtcttcgcgaaaagcgtacgatcataactcaccttatatatggccacgtaatgattatgatggatttttagagaacgcacacgaacaccatggggtgtataatcagggccgtggtatcgatagcggggaacggttaatgcaacccacacaaatgtctgcacaggaggatcttggggacgatacgggcatccacgttatccctacgttaaacggcgatgacagacataaaattgtaaatgtggaccaacgtcaatacggtgacgtgtttaaaggagatcttaatccaaaaccccaaggccaaagactcattgaggtgtcagtggaagaaaatcacccgtttactttacgcgcaccgattcagcggatttatggagtccggtacaccgagacttggagctttttgccgtcattaacctgtacgggagacgcagcgcccgccatccagcatatatgtttaaaacatacaacatgctttcaagacgtggtggtggatgtggattgcgcggaaaatactaaagaggatcagttggccgaaatcagttaccgttttcaaggtaagaaggaagcggaccaaccgtggattgttgtaaacacgagcacactgtttgatgaactcgaattagacccccccgagattgaaccgggtgtcttgaaagtacttcggacagaaaaacaatacttgggtgtgtacatttggaacatgcgcggctccgatggtacgtctacctacgccacgtttttggtcacctggaaaggggatgaaaaaacaagaaaccctacgcccgcagtaactcctcaaccaagaggggctgagtttcatatgtggaattaccactcgcatgtattttcagttggtgatacgtttagcttggcaatgcatcttcagtataagatacatgaagcgccatttgatttgctgttagagtggttgtatgtccccatcgatcctacatgtcaaccaatgcggttatattctacgtgtttgtatcatcccaacgcaccccaatgcctctctcatatgaattccggttgtacatttacctcgccacatttagcccagcgtgttgcaagcacagtgtatcaaaattgtgaacatgcagataactacaccgcatattgtctgggaatatctcatatggagcctagctttggtctaatcttacacgacgggggcaccacgttaaagtttgtagatacacccgagagtttgtcgggattatacgtttttgtggtgtattttaacgggcatgttgaagccgtagcatacactgttgtatccacagtagatcattttgtaaacgcaattgaagagcgtggatttccgccaacggccggtcagccaccggcgactactaaacccaaggaaattacccccgtaaaccccggaacgtcaccacttctacgatatgccgcatggaccggagggcttgcagcagtagtacttttatgtctcgtaatatttttaatctgtacggctaaacgaatgagggttaaagcctatagggtagacaagtccccgtataaccaaagcatgtattacgctggccttccagtggacgatttcgaggactcggaatctacggatacggaagaagagtttggtaacgcgattggagggagtcacgggggttcgagttacacggtgtatatagataagacccggtgatcaccgaaccggggcaacgccgagcgtgtaaatttaaataaaaaacagtacgcttttatccggtgtatgttttaaatttattttttttttctatataaagggatggggtgtcaggatctctcgtaggttcttgggactccaagggacccgcagcccaggtacgcgtcaaaaagcctgtgacaaattcccccggggcggtcatataattcggcgcggatgcatttattatcgggcgacaatccaatagtcggaagtccggcgtgtcccaaacagcaccaatatgccatcaatatcagccgctcgctgagctccagatgcgattgtggatccggcatgcattgctcgcgtaataacgataacaccgctctgcggatcggcggaaccgagggtggacgttgtctatccgctgcgagctccccgcacatccgtccgaaggcgtcctttgccctcccccacaaactcgcgcacggtctctcggaggggctgtgtataaaagcctcgtaggcctcggtagatatggcgcatagcgcggcggcgaagtaccgttcggcgtcgttcatgagagcctggtgcgcgggggtatcgtgtcgtgtgcagtaaagtccggcatattcaccgcccgggtgctcaccgcgggatccgcagagattcataccacacggcccgtgtggggaccccgtgggttaatggagacgttcaaaccagcaccctctaccctctaatatccacaacaccccactcccccacagacagacatcaaaaaaagacacgagccaaaccattgtatttatttataaagactacacgccatgggggggcggtatatcatgccggcgcggggcttcgtgtcgacgtcgcttccaatctacacccccctcgcccaacgcggtgagcgctttcgcggctgtatattccgcggtttctgcacccgcgtatcgctcgatggcacgctggggtctctttggggacggggtgttgcacccatccccgtctcgataacaatcgccgggtaccccgtctggttcacaagaatcggtgctctcctctgattcttcttccactataaagtcttccccgtccgatgattccgcgtcggaatcccgaaattcaattacatccgatggcgtagacccatcatcgtcgctatcgtcttcaccaccatcatcagatacgtcacattccagtgcgctcctatgcaaaggaacattcggcgcctcaatgaacccgtcttccccccgagggggtcgatgggacacttccattaaagtagcgcgtaagcactgcgtctgggtgggttgaagctgtaacaattcctcccagcacgctaacgtgggacgctgtctggtgcgacccattagataaaagtcgaggcatatgcgccgcaatcttcgtgaatctcgcgtgacgcgtcccgacgactgtgcaatacataaaaaaacacggttgatgtcctcaacgagcctggccgggtggatctcccaacccggagtacaaaacgcgccggggccccgcgacgtatcccggccgttcaggggtcctggtgcagatccatattccatctttccgttaacatcaaccgatgccccgggttttgactcggacgagtcgccccgcgtagccggtgaggtgcaaaacatgtccttggggccgtagtaaccttttcccttaaaaccgactcgacgctgtcgcgttatgaatcggacgaaccctgcacaacaaaacacacacccaaacgtttacatctatgaataaggctacttgggtaaaatggcaatgggggattccggggcgggagaccttcgattgggttgcctttataacaccaaaaaaaggggggggccccgtgtgtttttttttatcacgtcaaatcgattttaaaaagcctgccgctccatttggaatatatatattctgtgaaaagcccgcccacaccccataaaaccgcgacatcgcgggaacacgcgcgaacaagaaactctctctctttctctatatatatatatatatatatatatatatatagaaagaaagtgcgaacggtggttggacacatgccaaaacatgaaaacccatacagtgaaaaaacgggaagtgcgaatgcagatcaaaagagtgtatccgattggcgtacaccacagacatgcggacgcccaatttaaccccccccctttttcacccccccaccccaccccattccaccccaggaagtgcgaacgggtttacatgcctcagatatgaagttcttcgacttgtttttgaataaatttttttgtgattttctacaacggtttagagaattatggttataaacatcggcggggtaccgcgccccctccccatcggcggggtaccgcgccccctccccatcggcggggtaccgcgccccctccccatcggcggggtaccgcgccccctccccatcggcggggtaccgcgccccctccccatcggcggggggttacgtgaacaccacaaccccgtgtgtattttatgggttatcgcgggcttcgtgccgcctgacataatcgttgggaggggtggtggtgtatacgcttgttgattgcgcgaacgtaatgacgacggagagggacccaaacacaccgtcgacgtgcatttgattaactagatgccggatgggtggaaacaacccgtgttatataagatgttttgcatgtgagacaaccccaattgtgtttatgtatattatatatcgtctgtagacacacgatgattggttgttatttaaacatatgtaaatgaaattcacatgtctggtatcccttgttatgatgttgtaaggtatgcggaaatagacaccgggcgtacatcgccaaccagcggtctctccttaaacgcatactatggtccatgaacttcccgcctcgagtctcgtccaatcactacatcgtcttatcattaagaatatttacacggtgacgacacggggaggaaatatgcggtcgaggggggggcacaacacgttttaagtactgttggaactccctcaccaaccgcaatcgcaatcctttgaaggctgcgagagcgtttggaaaactcgggtacgtctaaattcaccccagtgcgatggatacgccgccgatgcagcgctctacaccccaacgcgcggggtcgcctgatactttggagttaatggacctgttggacgcggccgcggcggccgccgaacacagggcccgggtggtcacctcgagtcagcctgacgatctactatttggagagaacggggtcatggtgggacgggaacacgagatcgtttcaattccctccgtatcgggacttcaaccagaacccagaacggaagatgttggcgaagagctaacacaagacgactacgtatgcgaggacggtcaggatctaatgggctcgcctgtaatcccgctggccgaggtcttccacacccgattctcggaggccggcgcgcgagaaccaacaggagccgatcgctcccttgagacagtctctctcggaacgaagcttgctaggtctccaaaaccaccgatgaacgatggggaaacgggcagaggtacgacccctccgttcccgcaggccttctcccctgtatcccccgcgtctcctgttggagacgccgccgggaacgatcaacgggaagaccagcggtctataccccgacaaacgacgagaggaaattcaccaggtttgccgtcggtggtccatcgagacagacaaactcagtccatctcgggtaaaaagccgggcgatgagcaagcgggtcatgcgcatgcatcgggggacggagtagttctccagaaaactcaacggcccgctcagggaaagagcccgaagaaaaagactttgaaggttaaggtcccactcccggcgcggaaacccggtggacctgtacccggcccggttgagcaattgtaccacgtcctttcggacagcgttcccgctaagggggcaaaggcggacctgccgtttgagaccgatgatacccgcccaaggaaacatgatgcccggggtataacacctcgcgtccctggacgttcgtcggggggcaaacctagagcgtttttggccctgccgggaagatcccacgcaccagacccgattgaggatgacagcccagtggagaaaaagccaaagagtcgtgagtttgtttcgtcttcatcctcttcctcgtcgtggggatcgtcatcggaggatgaagacgatgaaccccggcgcgtttcggtgggaagtgaaactacaggcagcaggtccggacgcgaacacgccccttccccgtcaaattcggatgattcggactcaaatgatggtgggtcgacgaaacaaaatatccaaccgggatatcgatccatcagcggtcccgatccgaggattcgtaagaccaaacgtcttgcgggggaaccggggcgccagagacagaaatcattttccctgccgcgatccagaaccccgataattcccccggtgtcggggccgctcatgatgcccgacggaagcccttggcccggatcggcacccctcccatccaacagggtgcggtttggaccgtccggggagaccagagagggtcactgggaggatgaggctgtgagagcggcgcgggctcgttacgaggcctcaacggaacccgtgccgctttacgtgccggagttgggagatccggctagacagtaccgcgcgctgattaacctgatctactgtccagacagagaccctatagcatggctccagaaccccaagctgaccggtgtcaactcggccctgaaccagttctaccaaaagctgttgccaccgggacgggcgggtaccgccgttacggggagcgtagcgtctcccgttccgcatgtaggcgaagccatggccacgggggaggccctctgggctctcccccacgcggccgcggccgtggctatgagccgtcgatacgaccgggcccaaaaacactttatcctacagagtctccgcagagcctttgccagcatggcataccccgaggcaacgggctccagtccggcggcgcggatctcccgcggtcacccttctccaacaaccccggccacacaggctcccgaccctcagccgtcggccgccgcacgctctctttctgtgtgtccaccggatgatcgtttacgaactccgcgcaagcgcaagtcccagccagtcgagagcagaagcctcctcgacaagattagggagacacccgtcgcggacgcccgggttgcagacgatcatgtggtttccaaggccaagaggcgggtatccgagcccgtgaccatcacctcgggccctgtggtggatccccccgccgtaataacgatgccacttgacggaccggccccaaacgggggatttcggcgtattccccggggggccctgcataccccggtcccgtcggaccaggctcgcaaggcgtactgtacccccgaaaccatcgcccgtctggtcgacgacccattgtttcccacggcctggcgccctgcgctaagctttgatcccggcgccttggcggaaatcgccgctcggcgtccgggcggaggagaccgacggtttggtccacccagcggagtggaggcgctgcgacggaggtgcgcctggatgcggcagatcccagacccggaggatgtgaggcttctgatcatctacgatccgttgcccggagaggacatcaacggccccctcgagagcaccctcgcgacagatccgggaccgtcatggagtccatcccgagggggactgtctgtggtcctggcagccctgagtaaccggttgtgcctgccgagcactcatgcctgggccgggaactggaccggcccgccggacgtgtccgctttgaacgcccggggcgttttattactgtcgacccgagacctggcctttgccggggccgtcgagtatctaggctcgcggttggcctctgcccggcgccggttgctggtgttggacgcggtggccctcgagaggtggcccagggatggacccgctttgtctcagtatcacgtgtacgtccgggccccggcgcgaccggacgcccaggccgtcgtccgatggccagactcggcggtcacagaaggactcgcccgggccgtgtttgcatcgtcgcgcacctttgggccagcgagttttgctcgtatcgagactgcgtttgccaacctgtacccgggcgaacaacccctgtgtttgtgccgcggtgggaacgtcgcatacaccgtgtgtacccgcgcgggccccaagacccgcgtccccctgtcgccccgtgaataccggcagtacgtgctgccgggttttgacggttgcaaggacctcgcgcgacagtctcggggtctggggctcggggcagccgactttgtggacgaggcggcacatagccaccgcgcagcaaaccgatggggcctgggtgccgcgcttcgacccgtcttccttcccgagggacggagaccgggggccgccgggccggaggccggcgacgtacccacctgggcgagggtgttttgccgccacgccctgctggaacccgaccctgccgcagaaccactcgtgcttccacccgtggccggtcggtcggtggcgctgtatgcgtcggcggacgaggctcggaatgccctccccccgattcccagagtaatgtggccgcccggttttggggccgcggagacggtgttggaggggagcgacggaacacggttcgtgttcggacaccacgggggctcggaacggccgtcagaaacccaggcggggcgacagcggcgcaccgcagacgacagagaacacgctttggagctggacgattgggaggtggggtgtgaagacgcgtgggacagcgaggaggggggcggggacgacggggacgcaccggggtcatcctttggggtgagcatcgtgtcggtggccccgggtgtgctgcgagaccgccgggtgggtttgcgcccggcggtcaaggtggagctgttgtcctcgtcctcgtcctccgaggacgaggacgatgtgtggggagggcgcggggggaggagccccccgcagagtcgggggtgacggagtcccctccttttctcgtgagcgccactggcgcgcggactgtttgttgttaataaaagcggaacggtttttatgaaaaaagtgtctgtctgtctgtgcgggcgggcgacgggcgggctggtcggacccccccccgaaaataacccccccccggtttctgggcgcccggcggaccccgggagagg

SEQ ID NO: 5 - protein, 238 aa, Varicella zoster
MHVISETLAYGHVPAFIMGSTLVRPSLNATAEENPASETRCLLRVLAGRTVDLPGGGTLHITCTKTYVIIGKYSKPGERLSLARLIGRAMTPGGARTFIILAMKEKRSTTLGYECGTGLHLLAPSMGTFLRTHGLSNRDLCLWRGNIYDMHMQRLMFWENIAQNTTETPCITSTLTCNLTEDSGEAALTTSDRPTLPTLTAQGRPTVSNIRGILKGSPRQQPVCHRVRFAEPTEGVLM

SEQ ID NO: 6 - protein, 259 aa, Varicella zoster
MQTVCASLCGYARIPTEEPSYEEVRVNTHPQGAALLRLQEALTAVNGLLPAPLTLEDVVASADNTRRLVRAQALARTYAACSRNIECLKQHHFTEDNPGLNAVVRSHMENSKRLADMCLAAITHLYLSVGAVDVTTDDIVDQTLRMTAESEVVMSDVVLLEKTLGVVAKPQASFDVSHNHELSIAKGENVGLKTSPIKSEATQLSEIKPPLIEVSDNNTSNLTKKTYPTETLQPVLTPKQTQDVQRTTPAIKKSHVMLV

SEQ ID NO: 7 - protein, 87 aa, Varicella zoster
MGSITASFILITMQILFFCEDSSGEPNFAERNFWHASCSARGVYIDGSMITTLFFYASLLGVCVALISLAYHACFRLFTRSVLRSTW

SEQ ID NO: 8 - protein, 302 aa, Varicella zoster
MASSDGDRLCRSNAVRRKTTPSYSGQYRTARRSVVVGPPDDSDDSLGYITTVGADSPSPVYADLYFEHKNTTPRVHQPNDSSGSEDDFEDIDEVVAAFREARLRHELVEDAVYENPLSVEKPSRSFTKNAAVKPKLEDSPKRAPPGAGAIASGRPISFSTAPKTATSSWCGPTPSYNKRVFCEAVRRVAAMQAQKAAEAAWNSNPPRNNAELDRLLTGAVIRITVHEGLNLIQAANEADLGEGASVSKRGHNRKTGDLQGGMGNEPMYAQVRKPKSRTDTQTTGRITNRSRARSASRTDTRK

SEQ ID NO: 9 - protein, 410 aa, Varicella zoster
MECNLGTEHPSTDTWNRSKTEQAVVDAFDESLFGDVASDIGFETSLYSHAVKTAPSPPWVASPKILYQQLIRDLDFSEGPRLLSCLETWNEDLFSCFPINEDLYSDMMVLSPDPDDVISTVSTKDHVEMFNLTTRGSVRLPSPPKQPTGLPAYVQEVQDSFTVELRAREEAYTKLLVTYCKSIIRYLQGTAKRTTIGLNIQNPDQKAYTQLRQSILLRYYREVASLARLLYLHLYLTVTREFSWRLYASQSAHPDVFAALKFTWTERRQFTCAFHPVLCNHGIVLLEGKPLTASALREINYRRRELGLPLVRCGLVEENKSPLVQQPSFSVHLPRSVGFLTHHIKRKLDAYAVKHPQEPRHVRADHPYAKVVENRNYGSSIEAMILAPPSPSEILPGDPPRPPTCGFLTR

SEQ ID NO: 10 - protein, 819 aa, Varicella zoster
MQSGHYNRRQSRRQRISSNTTDSPRHTHGTRYRSTNWYTHPPQILSNSETLVAVQELLNSEMDQDSSSDASDDFPGYALHHSTYNGSEQNTSTSRHENRIFKLTEREANEEININTDAIDDEGEAEEGEAEEDAIDDEGEAEEGEAEEDAIDDEGEAEEGEAEEDAIDDEGEAEEGEAEEGEAEEGEAEEDAIDDEGEAEEDAAEEDAIDDEGEAEEDYFSVSQVCSRDADEVYFTLDPEISYSTDLRIAKVMEPAVSKELNVSKRCVEPVTLTGSMLAHNGFDESWFAMRECTRREYITVQGLYDPIHLRYQFDTSRMTPPQILRTIPALPNMTLGELLLIFPIEFMAQPISIERILVEDVFLDRRASSKTHKYGPRWNSVYALPYNAGKMYVQHIPGFYDVSLRAVGQGTAIWHHMILSTAACAISNRISHGDGLGFLLDAAIRISANCIFLGRNDNFGVGDPCWLEDHLAGLPREAVPDVLQVTQLVLPNRGPTVAIMRGFFGALAYWPELRIAISEPSTSLVRYATGHMELAEWFLFSRTHSLKPQFTPTEREMLASFFTLYVTLGGGMLNWICRATAMYLAAPYHSRSAYIAVCESLPYYYIPVNSDLLCDLEVLLLGEVDLPTVCESYATIAHELTGYEAVRTAATNFMIEFADCYKESETDLMVSAYLGAVLLLQRVLGHANLLLLLLSGAALYGGCSIYIPRGILDAYNTLMLAASPLYAHQTLTSFWKDRDDAMQTLGIRPTTDVLPKEQDRIVQASPIEMNFRFVGLETIYPREQPIPSVDLAENLMQYRNEILGLDWKSVAMHLLRKY

SEQ ID NO: 11 - protein, 661 aa, Varicella zoster
MFSRFARSFSSDDRTRKSYDGSYQSFNAGERDLPTPTRDWCSISQRITSERVRDGCLIPTPGEALETAVKALSEKTDSLTSPVLQSTERHSVLLGLHHNNVPESLVVSCMSNDVHDGFMQRYMETIQRCLDDLKLSGDGLWWVYENTYWQYLKYTTGAEVPVTSEKVNKKSKSTVLLFSSVVANKPISRHPFKSKVINSDYRGICQELREALGAVQKYMYFMRPDDPTNPSPDTRIRVQEIAAYTATGYGWMLWFLDVVDARVCRHLKLQFRRIRGPRASVIPDDLLRRHLKTGPAVSAGTGVAFILAATTASALTALLRISVLWRKEEWRDGLNGTAAAIVAAVELITLLHHHFQYLINMMLIGYACWGDGGLNDPYILKALRAQGRFLYFAGQLVRTMSTHSWVVLETSTHMWFSRAVAQSILAHGGKPTKYYAQVLAASKRYTPLHLRRISEPSSVSDQPYIRFNRLGSPIGTGIGNLECVCLTGNYLSDDVNASSHVINTEAPLNSIAPDTNRQRTSRVLVRPDTGLDVTVRKNHCLDIGHTDGSPVDPTYPDHYTRIKAEYEGPVRDESNTMFDQRSDLRHIETQASLNDHVYENIPPKEVGFNSSSDLDVDSLNGYTSGDMHTDDDLSPDFIPNDVPVRCKTTVTFRKNTPKSHH

SEQ ID NO: 12 - protein, 301 aa, Varicella zoster
MGDLSCWTKVPGFTLTGELQYLKQVDDILRYGVRKRDRTGIGTLSLFGMQARYNLRNEFPLLTTKRVFWRAVVEELLWFIRGSTDSKELAAKDIHIWDIYGSSKFLNRNGFHKRHTGDLGPIYGFQWRHFGAEYKDCQSNYLQQGIDQLQTVIDTIKTNPESRRMIISSWNPKDIPLMVLPPCHTLCQFYVANGELSCQVYQRSGDMGLGVPFNIAGYALLTYIVAHVTGLKTGDLIHTMGDAHIYLNHIDALKVQLARSPKPFPCLKIIRNVTDINDFKWDDFQLDGYNPHPPLKMEMAL

SEQ ID NO: 13 - protein, 455 aa, Varicella zoster
MGLFGLTRFIHEHKLVKPSIISTPPGVLTPVAVDVWNVMYTLLERLYPVGKRENLHGPSVTIHCLGVLLRLLTQRSYYPIFVLERCTDGPLSRGAKAIMSRAMNHDERGTSDLTRVLLSSNTSCSIKYNKTSETYDSVFRNSSTSCIPSEENKSQDMFLDGCPRQTDKTICLRDQNVCSLTSTMPSRGHPNHRLYHKLCASLIRWMGYAYVEAVDIEADEACANLFHTRTVALVYTTDTDLLFMGCDILLDAIPMFAPVVRCRDLLQYLGITYPEFLVAFVRCQTDLHTSDNLKSVQQVIQDTGLKVPHQMDTSTRSPTYDSWRHGEVFKSLTVATSGKTENGVSVSKYASNRSEVTVDASWALNLLPPSSSPLDNLERAFVEHIIAVVTPLTRGRLKLMKRVNIMQNTADPYMVINTLYHNLKGEKMARQYARIFKQFIPTPLPLNTVLTKYWN

SEQ ID NO: 14 - protein, 1038 aa, Varicella zoster
MEEPICYDTQKLLDDLSNLKVQEADNERPWSPEKTEIARVKVVKFLRSTQKIPAKHFIQIWEPLHSNICFVYSNTFLAEAAFTAENLPGLLFWRLDLDWTIEEPGNSLKILTQLSSVVQDSETLHRLSANKLRTSSKFGPVSIHFIITDWINMYEVALKDATTAIESPFTHARIGMLESAIAALTQHKFAIIYDMPFVQEGIRVLTQYAGWLLPFNVMWNQIQNSSLTPLTRALFIICMIDEYLTETPVHSISELFADTVNLIKDEAFVSIEEAVTNPRTVHESRISSALAYRDPYVFETSPGMLARRLRLDNGIWESNLLSLSTPGIHIEALLHLLNSDPEAETTSGSNVAEHTRGIWEKVQASTSPSMLISTLAESGFTRFSCKLLRRFIAHHTLAGFIHGSVVADEHITDFQQTLGCLALVGGLAYQLVETYAPTTEYVLTYTRTVNETEKRYETLLPALGLPPGGLGQIMRRCFAPRPLIESIQATRVILLNEISHAEARETTYFKQTHNQSSGALLPQAGQSAVREAVLTWFDLRMDSRWGITPPVDVGMTPPICVDPPATGLEAVMITEALKIAYPTEYNRSSVFVEPSFVPYIIATSTLDALSATIALSFDTRGIQQALSILQWARDYGSGTVPNADGYRTKLSALITILEPFTRTHPPVLLPSHVSTIDSLICELHRTVGIAVDLLPQHVRPLVPDRPSITNSVFLATLYYDELYGRWTRLDKTSQALVENFTSNALVVSRYMLMLQKFFACRFYPTPDLQAVGICNPKVERDEQFGVWRLNDLADAVGHIVGTIQGIRTQMRVGISSLRTIMADASSALRECENLMTKTSTSAIGPLFSTMASRYARFTQDQMDILMRVDKLTTGENIPGLANVEIFLNRWERIATACRHATAVPSAESIATVCNELRRGLKNIQEDRVNAPTSYMSHARNLEDHKAAVSFVMDSRQQFIVDSGPQMGAVLTSQCNIGTWENVNATFLHDNVKITTTVRDVISEAPTLIIGQRWLRPDEILSNVDLRLGVPGNTSGSDP

SEQ ID NO: 15 - protein, 2763 aa, Varicella zoster
MDIIPPIAVTVAGVGSRNQFDGALGPASGLSCLRTSLSFLHMTYAHGINATLSSDMIDGCLQEGAAWTTDLSNMGRGVPDMCALVDLPNRISYIKLGDTTSTCCVLSRIYGDSHFFTVPDEGFMCTQIPARAFFDDVWMGREESYTIITVDSTGMAIYRQGNISFIFDPHGHGTIGQAVVVRVNTTDVYSYIASEYTHRPDNVESQWAAALVFFVTANDGPVSEEALSSAVTLIYGSCDTYFTDEQYCEKLVTAQHPLLLSPPNSTTIVLNKSSIVPLHQNVGESVSLEATLHSTLTNTVALDPRCSYSEVDPWHAVLETTSTGSGVLDCRRRRRPSWTPPSSEENLACIDDGLVNNTHSTDNLHKPAKKVLKFKPTVDVPDKTQVAHVLPRLREVANTPDVVLNVSNVDTPESSPTFSRNMNVGSSLKDRKPFLFEQSGDVNMVVEKLLQHGHEISNGYVQNAVGTLDTVITGHTNVPIWVTRPLVMPDEKDPLELFINLTILRLTGFVVENGTRTHHGATSVVSDFIGPLGEILTGFPSAAELIRVTSLILTNMPGAEYAIKTVLRKKCTIGMLIIAKFGLVAMRVQDTTGALHAELDVLEADLGGSSPIDLYSRLSTGLISILNSPIISHPGLFAELIPTRTGSLSERIRLLCELVSARETRYMREHTALVSSVKALENALRSTRNKIDAIQIPEVPQEPPEETDIPPEELIRRVYEIRSEVTMLLTSAVTEYFTRGVLYSTRALIAEQSPRRFRVATASTAPIQRLLDSLPEFDAKLTAIISSLSIHPPPETIQNLPVVSLLKELIKEGEDLNTDTALVSWLSVVGEAQTAGYLSRREFDELSRTIKTINTRATQRASAEAELSCFNTLSAAVDQAVKDYETYNNGEVKYPEITRDDLLATIVRATDDLVRQIKILSDPMIQSGLQPSIKRRLETRLKEVQTYANEARTTQDTIKSRKQAAYNKLGGLLRPVTGFVGLRAAVDLLPELASELDVQGALVNLRTKVLEAPVEIRSQLTGDFWALFNQYRDILEHPGNARTSVLGGLGACFTAIIEIVPIPTEYRPSLLAFFGDVADVLASDIATVSTNPESESAINAVVATLSKATLVSSTVPALSFVLSLYKKYQALQQEITNTHKLTELQKQLGDDFSTLAVSSGHLKFISSSNVDDYEINDAILSIQTNVHALMDTVKLVEVELQKLPPHCIAGTSTLSRVVKDLHKLVTMAHEKKEQAKVLITDCERAHKQQTTRVLYERWTRDIIACLEAMETRHIFNGTELARLRDMAAAGGFDIHAVYPQARQVVAACETTAVTALDTVFRHNPYTPENTNIPPPLALLRGLTWFDDFSITAPVFTVMFPGVSIEGLLLLMRIRAVVLLSADTSINGIPNYRDMILRTSGDLLQIPALAGYVDFYTRSYDQFITESVTLSELRADIRQAAGAKLTEANKALEEVTHVRAHETAKLALKEGVFITLPSEGLLIRAIEYFTTFDHKRFIGTAYERVLQTMVDRDLKEANAELAQFRMVCQATKNRAIQILQNIVDTANATEQQEDVDFTNLKTLLKLTPPPKTIALAIDRSTSVQDIVTQFALLLGRLEEETGTLDIQAVDWMYQARNIIDSHPLSVRIDGTGPLHTYKDRVDKLYALRTKLDLLRRRIETGEVTWDDAWTTFKRETGDMLASGDTYATSVDSIKALQASASVVDMLCSEPEFFLLPVETKNRLQKKQQERKTALDVVLQKQRQFEETASRLRALIERIPTESDHDVLRMLLRDFDQFTHLPIWIKTQYMTFRNLLMVRLGLYASYAEIFPPASPNGVFAPIPAMSGVCLEDQSRCIRARVAAFMGEASVVQTFREARSSIDALFGKNLTFYLDTDGVPLRYRVCYKSVGVKLGTMLCSQGGLSLRPALPDEGIVEETTLSALRVANEVNELRIEYESAIKSGFSAFSTFVRHRHAEWGKTNARRAIAEIYAGLITTTLTRQYGVHWDKLIYSFEKHHLTSVMGNGLTKPIQRRGDVRVLELTLSDIVTILVATTPVHLLNFARLDLIKQHEYMARTLRPVIEAAFRGRLLVRSLDGDPKGNARAFFNAAPSKHKLPLALGSNQDPTGGRIFAFRMADWKLVKMPQKITDPFAPWQLSPPPGVKANVDAVTRIMATDRLATITVLGRMCLPPISLVSMWNTLQPEEFAYRTQDDVDIIVDARLDLSSTLNARFDTAPSNTTLEWNTDRKVITDAYIQTGATTVFTVTGAAPTHVSNVTAFDIATTAILFGAPLVIAMELTSVFSQNSGLTLGLKLFDSRHMATDSGISSAVSPDIVSWGLRLLHMDPHPIENACLIVQLEKLSALIANKPLTNNPPCLLLLDEHMNPSYVLWERKDSIPAPDYVVFWGPESLIDLPYIDSDEDSFPSCPDDPFYSQIIAGYAPQGPPNLDTTDFYPTEPLFKSPVQVVRSSKCKKMPVRPAQPAQPAQPAQPAQTVQPAQPIEPGTQIVVQNFKKPQSVKTTLSQKDIPLYVETESETAVLIPKQLTTSIKTTVCKSITPPNNQLSDWKNNPQQNQTLNQAFSKPILEITSIPTDDSISYRTWIEKSNQTQKRHQNDPRMYNSKTVFHPVNNQLPSWVDTAADAPQTDLLTNYKTRQPSPNFPRDVHTWGVSSNPFNSPNRDLYQSDFSEPSDGYSSESENSIVLSLDEHRSCRVPRHVRVVNADVVTGRRYVRGTALGALALLSQACRRMIDNVRYTRKLLMDHTEDIFQGLGYVKLLLDGTYI

SEQ ID NO: 16 - protein, 585 aa, Varicella zoster
MDRVESEEPMDGFESPVFSENTSSNSGWCSDAFSDSYIAYNPALLLKNDLLFSELLFASHLINVPRAIENNVTYEASSAVGVDNEMTSSTTEFIEEIGDVLALDRACLVCRTLDLYKRKFGLTPEWVADYAMLCMKSLASPPCAVVTFSAAFEFVYLMDRYYLCRYNVTLVGSFARRTLSLLDIQRHFFLHVCFRTDGGLPGIRPPPGKEMANKVRYSNYSFFVQAVVRAALLSISTSRLDETETRKSFYFNQDGLTGGPQPLAAALANWKDCARMVDCSSSEHRTSGMITCAERALKEDIEFEDILIDKLKKSSYVEAAWGYADLALLLLSGVATWNVDERTNCAIETRVGCVKSYWQANRIENSRDVPKQFSKFTSEDACPEVAFGPILLTTLKNAKCRGRTNTECMLCCLLTIGHYWIALRQFKRDILAYSANNTSLFDCIEPVINAWSLDNPIKLKFPFNDEGRFITIVKAAGSEAVYKHLFCDLLCALSELQTNPKILFAHPTTADKEVLELYKAQLAAQNRFEGRVCAGLWTLAYAFKAYQIFPRKPTANAAFIRDGGLMLRRHAISLVSLEHTLSKYV

SEQ ID NO: 17 - protein, 1204 aa, Varicella zoster
MENTQKTVTVPTGPLGYVYACRVEDLDLEEISFLAARSTDSDLALLPLMRNLTVEKTFTSSLAVVSGARTTGLAGAGITLKLTTSHFYPSVFVFHGGKHVLPSSAAPNLTRACNAARERFGFSRCQGPPVDGAVETTGAEICTRLGLEPENTILYLVVTALFKEAVFMCNVFLHYGGLDIVHINHGDVIRIPLFPVQLFMPDVNRLVPDPFNTHHRSIGEGFVYPTPFYNTGLCHLIHDCVIAPMAVALRVRNVTAVARGAAHLAFDENHEGAVLPPDITYTYFQSSSSGTTTARGARRNDVNSTSKPSPSGGFERRLASIMAADTALHAEVIFNTGIYEETPTDIKEWPMFIGMEGTLPRLNALGSYTARVAGVIGAMVFSPNSALYLTEVEDSGMTEAKDGGPGPSFNRFYQFAGPHLAANPQTDRDGHVLSSQSTGSSNTEFSVDYLALICGFGAPLLARLLFYLERCDAGAFTGGHGDALKYVTGTFDSEIPCSLCEKHTRPVCAHTTVHRLRQRMPRFGQATRQPIGVFGTMNSQYSDCDPLGNYAPYLILRKPGDQTEAAKATMQDTYRATLERLFIDLEQERLLDRGAPCSSEGLSSVIVDHPTFRRILDTLRARIEQTTTQFMKVLVETRDYKIREGLSEATHSMALTFDPYSGAFCPITNFLVKRTHLAVVQDLALSQCHCVFYGQQVEGRNFRNQFQPVLRRRFVDLFNGGFISTRSITVTLSEGPVSAPNPTLGQDAPAGRTFDGDLARVSVEVIRDIRVKNRVVFSGNCTNLSEAARARLVGLASAYQRQEKRVDMLHGALGFLLKQFHGLLFPRGMPPNSKSPNPQWFWTLLQRNQMPADKLTHEEITTIAAVKRFTEEYAAINFINLPPTCIGELAQFYMANLILKYCDHSQYLINTLTSIITGARRPRDPSSVLHWIRKDVTSAADIETQAKALLEKTENLPELWTTAFTSTHLVRAAMNQRPMVVLGISISKYHGAAGNNRVFQAGNWSGLNGGKNVCPLFTFDRTRRFIIACPRGGFICPVTGPSSGNRETTLSDQVRGIIVSGGAMVQLAIYATVVRAVGARAQHMAFDDWLSLTDDEFLARDLEELHDQIIQTLETPWTVEGALEAVKILDEKTTAGDGETPTNLAFNFDSCEPSHDTTSNVLNISGSNISGSTVPGLKRPPEDDELFDLSGIPIKHGNITMEMI

SEQ ID NO: 18 - protein, 770 aa, Varicella zoster
MELDINRTLLVLLGQVYTYIFQVELLRRCDPRVACRFLYRLAANCLTVRYLLKLFLRGFNTQLKFGNTPTVCALHWALCYVKGEGERLFELLQHFKTRFVYGETKDSNCIKDYFVSAFNLKTCQYHHELSLTTYGGYVSSEIQFLHDIENFLKQLNYCYIITSSREALNTLETVTRFMTDTIGSGLIPPVELFDPAHPCAICFEELCITANQGETLHRRLLGCICDHVTKQVRVNVDVDDIIRCLPYIPDVPDIKRQSAVEALRTLQTKTVVNPMGAKNDTFDQTYEIASTMLDSYNVFKPAPRCMYAISELKFWLTSNSTEGPQRTLDVFVDNLDVLNEHEKHAELTAVTVELALFGKTPIHFDRAFSEELGSLDAIDSILVGNRSSSPDSQIEALIKACYAHHLSSPLMRHISNPSHDNEAALRQLLERVGCEDDLTKEASDSATASECDLNDDSSITFAVHGWENLLSKAKIDAAERKRVYLEHLSKRSLTSLGRCIREQRQELEKTLRVNVYGEALLQTFVSMQNGFGARNVFLAKVSQAGCIIDNRIQEAAFDAHRFIRNTLVRHTVDAAMLPALTHKFFELVNGPLFNHDEHRFAQPPNTALFFTVENVGLFPHLKEELAKFMGGVVGSNWLLSPFRGFYCFSGVEGVTFAQRLAWKYIRELVFATTLFTSVFHCGEVRLCRVDRLGKDPRGCTSQPKGIGSSHGPLDGIYLTYEETCPLVAIIQSGETGIDQNTVVIYDSDVFSLLYTLMQRLAPDSTDPAFS

SEQ ID NO: 19 - protein, 868 aa, Varicella zoster
MFVTAVVSVSPSSFYESLQVEPTQSEDITRSAHLGDGDEIREAIHKSQDAETKPTFYVCPPPTGSTIVRLEPTRTCPDYHLGKNFTEGIAVVYKENIAAYKFKATVYYKDVIVSTAWAGSSYTQITNRYADRVPIPVSEITDTIDKFGKCSSKATYVRNNHKVEAFNEDKNPQDMPLIASKYNSVGSKAWHTTNDTYMVAGTPGTYRTGTSVNCIIEEVEARSIFPYDSFGLSTGDIIYMSPFFGLRDGAYREHSNYAMDRFHQFEGYRQRDLDTRALLEPAARNFLVTPHLTVGWNWKPKRTEVCSLVKWREVEDVVRDEYAHNFRFTMKTLSTTFISETNEFNLNQIHLSQCVKEEARAIINRIYTTRYNSSHVRTGDIQTYLARGGFVVVFQPLLSNSLARLYLQELVRENTNHSPQKHPTRNTRSRRSVPVELRANRTITTTSSVEFAMLQFTYDHIQEHVNEMLARISSSWCQLQNRERALWSGLFPINPSALASTILDQRVKARILGDVISVSNCPELGSDTRIILQNSMRVSGSTTRCYSRPLISIVSLNGSGTVEGQLGTDNELIMSRDLLEPCVANHKRYFLFGHHYVYYEDYRYVREIAVHDVGMISTYVDLNLTLLKDREFMPLQVYTRDELRDTGLLDYSEIQRRNQMHSLRFYDIDKVVQYDSGTAIMQGMAQFFQGLGTAGQAVGHVVLGATGALLSTVHGFTTFLSNPFGALAVGLLVLAGLVAAFFAYRYVLKLKTSPMKALYPLTTKGLKQLPEGMDPFAEKPNATDTPIEEIGDSQNTEPSVNSGFDPDKFREAQEMIKYMTLVSAAERQESKARKKNKTSALLTSRLTGLALRNRRGYSRVRTENVTGV

SEQ ID NO: 20 - protein, 143 aa, Varicella zoster
MESSNINALQQPSSIAHHPSKQCASSLNETVKDSPPAIYEDRLEHTPVQLPRDGTPRDVCSVGQLTCRACATKPFRLNRDSQYDYLNTCPGGRHISLALEIITGRWVCIPRVFPDTPEEKWMAPYIIPDREQPSSGDEDSDTD

SEQ ID NO: 21 - protein, 341 aa, Varicella zoster
MSTDKTDVKMGVLRIYLDGAYGIGKTTAAEEFLHHFAITPNRILLIGEPLSYWRNLAGEDAICGIYGTQTRRLNGDVSPEDAQRLTAHFQSLFCSPHAIMHAKISALMDTSTSDLVQVNKEPYKIMLSDRHPIASTICFPLSRYLVGDMSPAALPGLLFTLPAEPPGTNLVVCTVSLPSHLSRVSKRARPGETVNLPFVMVLRNVYIMLINTIIFLKTNNWHAGWNTLSFCNDVFKQKLQKSECIKLREVPGIEDTLFAVLKLPELCGEFGNILPLWAWGMETLSNCSRSMSPFVLSLEQTPQHAAQELKTLLPQMTPANMSSGAWNILKELVNAVQDNTS

SEQ ID NO: 22 - protein, 841 aa, Varicella zoster
MFALVLAVVILPLWTTANKSYVTPTPATRSIGHMSALLREYSDRNMSLKLEAFYPTGFDEELIKSLHWGNDRKHVFLVIVKVNPTTHEGDVGLVIFPKYLLSPYHFKAEHRAPFPAGRFGFLSHPVTPDVSFFDSSFAPYLTTQHLVAFTTFPPNPLVWHLERAETAATAERPFGVSLLPARPTVPKNTILEHKAHFATWDALARHTFFSAEAIITNSTLRIHVPLFGSVWPIRYWATGSVLLTSDSGRVEVNIGVGFMSSLISLSSGPPIELIVVPHTVKLNAVTSDTTWFQLNPPGPDPGPSYRVYLLGRGLDMNFSKHATVDICAYPEESLDYRYHLSMAHTEALRMTTKADQHDINEESYYHIAARIATSIFALSEMGRTTEYFLLDEIVDVQYQLKFLNYILMRIGAGAHPNTISGTSDLIFADPSQLHDELSLLFGQVKPANVDYFISYDEARDQLKTAYALSRGQDHVNALSLARRVIMSIYKGLLVKQNLNATERQALFFASMILLNFREGLENSSRVLDGRTTLLLMTSMCTAAHATQAALNIQEGLAYLNPSKHMFTIPNVYSPCMGSLRTDLTEEIHVMNLLSAIPTRPGLNEVLHTQLDESEIFDAAFKTMMIFTTWTAKDLHILHTHVPEVFTCQDAAARNGEYVLILPAVQGHSYVITRNKPQRGLVYSLADVDVYNPISVVYLSRDTCVSEHGVIETVALPHPDNLKECLYCGSVFLRYLTTGAIMDIIIIDSKDTERQLAAMGNSTIPPFNPDMHGDDSKAVLLFPNGTVVTLLGFERRQAIRMSGQYLGASLGGAFLAVVGFGIIGWMLCGNSRLREYNKIPLT

SEQ ID NO: 23 - protein, 240 aa, Varicella zoster
MNPPQARVSEQTKDLLSVMVNQHPEEDAKVCKSSDNSPLYNTMVMLSYGGDTDLLLSSACTRTSTVNRSAFTQHSVFYIISTVLIQPICCIFFFFYYKATRCMLLFTAGLLLTILHHFRLIIMLLCVYRNIRSDLLPLSTSQQLLLGIIVVTRTMLFCITAYYTLFIDTRVFFLITGHLQSEVIFPDSVSKILPVSWGPSPAVLLVMAAVIYAMDCLVDTVSFIGPRVWVRVMLKTSISF

SEQ ID NO: 24 - protein, 1396 aa, Varicella zoster
MTTVSCPANVITTTESDRIAGLFNIPAGIIPTGNVLSTIEVCAHRCIFDFFKQIRSDDNSLYSAQFDILLGTYCNTLNFVRFLELGLSVACICTKFPELAYVRDGVIQFEVQQPMIARDGPHPVDQPVHNYMVKRIHKRSLSAAFAIASEALSLLSNTYVDGTEIDSSLRIRAIQQMARNLRTVLDSFERGTADQLLGVLLEKAPPLSLLSPINKFQPEGHLNRVARAALLSDLKRRVCADMFFMTRHAREPRLISAYLSDMVSCTQPSVMVSRITHTNTRGRQVDGVLVTTATLKRQLLQGILQIDDTAADVPVTYGEMVLQGTNLVTALVMGKAVRGMDDVARHLLDITDPNTLNIPSIPPQSNSDSTTAGLPVNARVPADLVIVGDKLVFLEALERRVYQATRVAYPLIGNIDITFIMPMGVFQANSMDRYTRHAGDFSTVSEQDPRQFPPQGIFFYNKDGILTQLTLRDAMGTICHSSLLDVEATLVALRQQHLDRQCYFGVYVAEGTEDTLDVQMGRFMETWADMMPHHPHWVNEHLTILQFIAPSNPRLRFELNPAFDFFVAPGDVDLPGPQRPPEAMPTVNATLRIINGNIPVPLCPISFRDCRGTQLGLGRHTMTPATIKAVKDTFEDRAYPTIFYMLEAVIHGNERNFCALLRLLTQCIRGYWEQSHRVAFVNNFHMLMYITTYLGNGELPEVCINIYRDLLQHVRALRQTITDFTIQGEGHNGETSEALNNILTDDTFIAPILWDCDALIYRDEAARDRLPAIRVSGRNGYQALHFVDMAGHNFQRRDNVLIHGRPVRGDTGQGIPITPHHDREWGILSKIYYYIVIPAFSRGSCCTMGVRYDRLYPALQAVIVPEIPADEEAPTTPEDPRHPLHAHQLVPNSLNVYFHNAHLTVDGDALLTLQELMGDMAERTTAILVSSAPDAGAATATTRNMRIYDGALYHGLIMMAYQAYDETIATGTFFYPVPVNPLFACPEHLASLRGMTNARRVLAKMVPPIPPFLGANHHATIRQPVAYHVTHSKSDFNTLTYSLLGGYFKFTPISLTHQLRTGFHPGIAFTVVRQDRFATEQLLYAERASESYFVGQIQVHHHDAIGGVNFTLTQPRAHVDLGVGYTAVCATAALRCPLTDMGNTAQNLFFSRGGVPMLHDNVTESLRRITASGGRLNPTEPLPIFGGLRPATSAGIARGQASVCEFVAMPVSTDLQYFRTACNPRGRASGMLYMGDRDADIEAIMFDHTQSDVAYTDRATLNPWASQKHSYGDRLYNGTYNLTGASPIYSPCFKFFTPAEVNTNCNTLDRLLMEAKAVASQSSTDTEYQFKRPPGSTEMTQDPCGLFQEAYPPLCSSDAAMLRTAHAGETGADEVHLAQYLIRDASPLRGCLPLPR

SEQ ID NO: 25 - protein, 316 aa, Varicella zoster
MAMPFEIEVLLPGELSPAETSALQKCEGKIITFSTLRHRASLVDIALSSYYINGAPPDTLSLLEAYRMRFAAVITRVIPGKLLAHAIGVGTPTPGLFIQNTSPVDLCNGDYICLLPPVFGSADSIRLDSVGLEIVFPLTIPQTLMREIIAKVVARAVERTAAGAQILPHEVLRGADVICYNGRRYELETNLQHRDGSDAAIRTLVLNLMFSINEGCLLLLALIPTLLVQGAHDGYVNLLIQTANCVRETGQLINIPPMPRIQDGHRRFPIYETISSWISTSSRLGDTLGTRAILRVCVFDGPSTVHPGDRTAVIQV

SEQ ID NO: 26 - protein, 676 aa, Varicella zoster
MEAHLANETKHALWHNDHTKGLLHVVIPNAGLIAAGIDPALLILKKPGQRFKVEVQTRYHATGQCEPWCQVFAAYIPDNALTNLLIPKTEPFVSHVFSATHNSGGLILSLPVYLSPGLFFDAFNVVAIRINTGNRKHRDICIMYAELIPNGTRYFADGQRVLLLCKQLIAYIRCTPRLASSIKIYAEHMVAAMGESHTSNGDNIGPVSSIIDLDRQLTSGGIDDSPAETRIQENNRDVLELIKRAVNIVNSRHPVRPSSSRVASGLLQSAKGHGAQTSNTDPINNGSFDGVLEPPGQGRFTGKKNNSSASIPPLQDVLLFTPASTEPQSLMEWFDICYAQLVSGDTPADFWKRRPLSIVPRHYAESPSPLIVVSYNGSSAWGGRITGSPILYHSAQAIIDAACINARVDNPQSLHVTARQELVARLPFLANVLNNQTPLPAFKPGAEMFLNQVFKQACVTSLTQGLITELQTNPTLQQLMEYDIADSSQTVIDEIVARTPDLIQTIVSVLTEMSMDAFYNSSLMYAVLAYLSSVYTRPQGGGYIPYLHASFPCWLGNRSIYLFDYYNSGGEILKLSKVPVPVALEKVGIGNSTQLRGKFIRSADIVDIGICSKYLPGQCYAYICLGFNQQLQSILVLPGGFAACFCITDTLQAALPASLIGPILDRFCFSIPNPHK

SEQ ID NO: 27 - protein, 363 aa, Varicella zoster
MELQRIFPLYTATGAARKLTPEAVQRLCDALTLDMGLWKSILTDPRVKIMRSTAFITLRIAPFIPLQTDTTNIAVVVATIYITRPRQMNLPPKTFHVIVNFNYEVSYAMTATLRIYPVENIDHVFGATFKNPIAYPLPTSIPDPRADPTPADLTPTPNLSNYLQPPRLPKNPYACKVISPGVWWSDERRRLYVLAMEPNLIGLCPAGWHARILGSVLNRLLSHADGCDECNHRVHVGALYALPHVTNHAEGCVCWAPCMWRKAGQRELKVEVDIGATQVLFVDVTTCIRITSTKNPRITANLGDVIAGTNASGLSVPVNSSGWQLYMFGETLSRAIINGCGLLQRICFPETQRLSGEPEPTTT

SEQ ID NO: 28 - protein, 199 aa, Varicella zoster
MSGHTPTYASHRRNRVKLVEAHNRAGLFKERTLDLIRGGASVQDPAFVYAFTAAKEACADLNNQLRSAARIASVEQKIRDIQSKVEEQTSIQQILNTNRRYIAPDFIRGLDKTEDDNTDNIDRLEDAVGPNIEHENHTWFGEDDEALLTQWMLTTHPPTSKYLQLQDLCVPTTIPTDMNQMQPQPISKNENPPTPHTDV

SEQ ID NO: 29 - protein, 551 aa, Varicella zoster
MARSGLDRIDISPQPAKKIARVGGLQHPFVKTDINTINVEHHFIDTLQKTSPNMDCRGMTAGIFIRLSHMYKILTTLESPNDVTYTTPGSTNALFFKTSTQPQEPRPEELASKLTQDDIKRILLTIESETRGQGDNAIWTLLRRNLITASTLKWSVSGPVIPPQWFYHHNTTDTYGDAAAMAFGKTNEPAARAIVEALFIDPADIRTPDHLTPEATTKFFNFDMLNTKSPSLLVGTPRIGTYECGLLIDVRTGLIGASLDVLVCDRDPLTGTLNPHPAETDISFFEIKCRAKYLFDPDDKNNPLGRTYTTLINRPTMANLRDFLYTIKNPCVSFFGPSANPSTREALITDHVEWKRLGFKGGRALTELDAHHLGLNRTISSRVWVFNDPDIQKGTITTIAWATGDTALQIPVFANPRHANFKQIAVQTYVLSGYFPALKLRPFLVTFIGRVRRPHEVGVPLRVDTQAAAIYEYNWPTIPPHCAVPVIAVLTPIEVDVPRVTQILKDTGNNAITSALRSLRWDNLHPAVEEESVDCANGTTSLLRATEKPLL

SEQ ID NO: 30 - protein, 835 aa, Varicella zoster
MSPNTGESNAAVYASSTQLARALYGGDLVSWIKHTHPGISLELQLDVPVKLIKPGMSQTRPVTVVRAPMGSGKTTALLEWLQHALKADISVLVVSCRRSFTQTLIQRFNDAGLSGFVTYLTSETYIMGFKRLIVQLESLHRVSSEAIDSYDVLILDEVMSVIGQLYSPTMRRLSAVDSLLYRLLNRCSQIIAMDATVNSQFIDLISGLRGDENIHTIVCTYAGVGFSGRTCTILRDMGIDTLVRVIKRSPEHEDVRTIHQLRGTFFDELALRLQCGHNICIFSSTLSFSELVAQFCAIFTDSILILNSTRPLCNVNEWKHFRVLVYTTVVTVGLSFDMAHFHSMFAYIKPMSYGPDMVSVYQSLGRVRLLLLNEVLMYVDGSRTRCGPLFSPMLLNFTIANKFQWFPTHTQITNKLCCAFRQRCANAFTRSNTHLFSRFKYKHLFERCSLWSLADSINILQTLLASNQILVVLDGMGPITDVSPVQFCAFIHDLRHSANAVASCMRSLRQDNDSCLTDFGPSGFMADNITAFMEKYLMESINTEEQIKVFKALACPIEQPRLVNTAILGACIRIPEALEAFDVFQKIYTHYASGWFPVLDKTGEFSIATITTAPNLTTHWELFRRCAYIAKTLKWNPSTEGCVTQVLDTDINTLFNQHGDSLAQLIFEVMRCNVTDAKIILNRPVWRTTGFLDGCHNQCFRPIPTKHEYNIALFRLIWEQLFGARVTKSTQTFPGSTRVKNLKKKDLETLLDSINVDRSACRTYRQLYNLLMSQRHSFSQQRYKITAPAWARHVYFQAHQMHLAPHAEAMLQLALSELSPGSWPRINGAVNFESL

SEQ ID NO: 31 - protein, 771 aa, Varicella zoster
MDATQITLVRESGHICAASIYTSWTQSGQLTQNGLSVLYYLLCKNSCGKYVPKFAEITVQQEDLCRYSRHGGSVSAATFASICRAASSAALDAWPLEPLGNADTWRCLHGTALATLRRVLGFKSFYSPVTFETDTNTGLLLKTIPDEHALNNDNTPSTGVLRANFPVAIDVSAVSACNAHTQGTSLAYARLTALKSNGDTQQQTPLDVEVITPKAYIRRKYKSTFSPPIEREGQTSDLFNLEERRLVLSGNRAIVVRVLLPCYFDCLTTDSTVTSSLSILATYRLWYAAAFGKPGVVRPIFAYLGPELNPKGEDRDYFCTVGFPGWTTLRTQTPAVESIRTATEMYMETDGLWPVTGIQAFHYLAPWGQHPPLPPRVQDLIGQIPQDTGHADATVNWDAGRISTVFKQPVQLQDRWMAKFDFSAFFPTIYCAMFPMHFRLGKIVLARMRRGMGCLKPALVSFFGGLRHILPSIYKAIIFIANEISLCVEQTALEQGFAICTYIKDGFWGIFTDLHTRNVCSDQARCSALNLAATCERAVTGLLRIQLGLNFTPAMEPVLRVEGVYTHAFTWCTTGSWLWNLQTNTPPDLVGVPWRSQAARDLKERLSGLLCTATKIRERIQENCIWDHVLYDIWAGQVVEAARKTYVDFFEHVFDRRYTPVYWSLQEQNSETKAIPASYLTYGHMQDKDYKPRQIIMVRNPNPHGPPTVVYWELLPSCACIPPIDCAAHLKPLIHTFVTIINHLLDAHNDFSSPSLKFTDDPLASYNFLFL

SEQ ID NO: 32 - protein, 881 aa, Varicella zoster
MKRSISVDSSSPKNVFNPETPNGFDDSVYLNFTSMHSIQPILSRIRELAAITIPKERVPRLCWFKQLLELQAPPEMQRNELPFSVYLISGNAGSGKSTCIQTLNEAIDCIITGSTRVAAQNVHAKLSTAYASRPINTIFHEFGFRGNHIQAQLGRYAYNWTTTPPSIEDLQKRDIVYYWEVLIDITKRVFQMGDDGRGGTSTFKTLWAIERLLNKPTGSMSGTAFIACGSLPAFTRSNVIVIDEAGLLGRHILTAVVYCWWLLNAIYQSPQYINGRKPVIVCVGSPTQTDSLESHFQHDMQRSHVTPSENILTYIICNQTLRQYTNISHNWAIFINNKRCQEDDFGNLLKTLEYGLPITEAHARLVDTFVVPASYINNPANLPGWTRLYSSHKEVSAYMSKLHAHLKLSKNDHFSVFALPTYTFIRLTAFDEYRKLTGQPGLSVEHWIRANSGRLHNYSQSRDHDMGTVKYETHSNRDLIVARTDITYVLNSLVVVTTRLRKLVIGFSGTFQSFAKVLRDDSFVKARGETSIEYAYRFLSNLIFGGLINFYNFLLNKNLHPDKVSLAYKRLAALTLELLSGTNKAPLHEAAVNGAGAGIDCDGAATSADKAFCFTKAPESKVTASIPEDPDDVIFTALNDEVIDLVYCQYEFSYPKSSNEVHAQFLLMKAIYDGRYAILAELFESSFTTAPFSAYVDNVNFNGSELLIGNVRGGLLSLALQTDTYTLLGYTFAPVPVFVEELTRKKLYRETTEMLYALHVPLMVLQDQHGFVSIVNANVCEFTESIEDAELAMATTVDYGLSSKLAMTIARSQGLSLEKVAICFTADKLRLNSVYVAMSRTVSSRFLKMNLNPLRERYEKSAEISDHILAALRDPNVHVVY

SEQ ID NO: 33 - protein, 278 aa, Varicella zoster
MFCTSPATRGDSSESKPGASVDVNGKMEYGSAPGPLNGRDTSRGPGAFCTPGWEIHPARLVEDINRVFLCIAQSSGRVTRDSRRLRRICLDFYLMGRTRQRPTLACWEELLQLQPTQTQCLRATLMEVSHRPPRGEDGFIEAPNVPLHRSALECDVSDDGGEDDSDDDGSTPSDVIEFRDSDAESSDGEDFIVEEESEESTDSCEPDGVPGDCYRDGDGCNTPSPKRPQRAIERYAGAETAEYTAAKALTALGEGGVDWKRRRHEAPRRHDIPPPHGV

SEQ ID NO: 34 - protein, 180 aa, Varicella zoster
MNLCGSRGEHPGGEYAGLYCTRHDTPAHQALMNDAERYFAAALCAISTEAYEAFIHSPSERPCASLWGRAKDAFGRMCGELAADRQRPPSVPPIRRAVLSLLREQCMPDPQSHLELSERLILMAYWCCLGHAGLPTIGLSPDNKCIRAELYDRPGGICHRLFDAYLGCGSLGVPRTYERS

SEQ ID NO: 35 - protein, 393 aa, Varicella zoster
MNDVDATDTFVGQGKFRGAISTSPSHIMQTCGFIQQMFPVEMSPGIESEDDPNYDVNMDIQSFNIFDGVHETEAEASVALCAEARVGINKAGFVILKTFTPGAEGFAFACMDSKTCEHVVIKAGQRQGTATEATVLRALTHPSVVQLKGTFTYNKMTCLILPRYRTDLYCYLAAKRNLPICDILAIQRSVLRALQYLHNNSIIHRDIKSENIFINHPGDVCVGDFGAACFPVDINANRYYGWAGTIATNSPELLARDPYGPAVDIWSAGIVLFEMATGQNSLFERDGLDGNCDSERQIKLIIRRSGTHPNEFPINPTSNLRRQYIGLAKRSSRKPGSRPLWTNLYELPIDLEYLICKMLSFDARHRPSAEVLLNHSVFQTLPDPYPNPMEVGD

SEQ ID NO: 36 - protein, 354 aa, Varicella zoster
MFLIQCLISAVIFYIQVTNALIFKGDHVSLQVNSSLTSILIPMQNDNYTEIKGQLVFIGEQLPTGTNYSGTLELLYADTVAFCFRSVQVIRYDGCPRIRTSAFISCRYKHSWHYGNSTDRISTEPDAGVMLKITKPGINDAGVYVLLVRLDHSRSTDGFILGVNVYTAGSHHNIHGVIYTSPSLQNGYSTRALFQQARLCDLPATPKGSGTSLFQHMLDLRAGKSLEDNPWLHEDVVTTETKSVVKEGIENHVYPTDMSTLPEKSLNDPPENLLIIIPIVASVMILTAMVIVIVISVKRRRIKKHPIYRPNTKTRRGIQNATPESDVMLEAAIAQLATIREESPPHSVVNPFVK

SEQ ID NO: 37 - protein, 623 aa, Varicella zoster
MGTVNKPVVGVLMGFGIITGTLRITNPVRASVLRYDDFHTDEDKLDTNSVYEPYYHSDHAESSWVNRGESSRKAYDHNSPYIWPRNDYDGFLENAHEHHGVYNQGRGIDSGERLMQPTQMSAQEDLGDDTGIHVIPTLNGDDRHKIVNVDQRQYGDVFKGDLNPKPQGQRLIEVSVEENHPFTLRAPIQRIYGVRYTETWSFLPSLTCTGDAAPAIQHICLKHTTCFQDVVVDVDCAENTKEDQLAEISYRFQGKKEADQPWIVVNTSTLFDELELDPPEIEPGVLKVLRTEKQYLGVYIWNMRGSDGTSTYATFLVTWKGDEKTRNPTPAVTPQPRGAEFHMWNYHSHVFSVGDTFSLAMHLQYKIHEAPFDLLLEWLYVPIDPTCQPMRLYSTCLYHPNAPQCLSHMNSGCTFTSPHLAQRVASTVYQNCEHADNYTAYCLGISHMEPSFGLILHDGGTTLKFVDTPESLSGLYVFVVYFNGHVEAVAYTVVSTVDHFVNAIEERGFPPTAGQPPATTKPKEITPVNPGTSPLLRYAAWTGGLAAVVLLCLVIFLICTAKRMRVKAYRVDKSPYNQSMYYAGLPVDDFEDSESTDTEEEFGNAIGGSHGGSSYTVYIDKTR

SEQ ID NO: 38 - protein, 1310 aa, Varicella zoster
MDTPPMQRSTPQRAGSPDTLELMDLLDAAAAAAEHRARVVTSSQPDDLLFGENGVMVGREHEIVSIPSVSGLQPEPRTEDVGEELTQDDYVCEDGQDLMGSPVIPLAEVFHTRFSEAGAREPTGADRSLETVSLGTKLARSPKPPMNDGETGRGTTPPFPQAFSPVSPASPVGDAAGNDQREDQRSIPRQTTRGNSPGLPSVVHRDRQTQSISGKKPGDEQAGHAHASGDGVVLQKTQRPAQGKSPKKKTLKVKVPLPARKPGGPVPGPVEQLYHVLSDSVPAKGAKADLPFETDDTRPRKHDARGITPRVPGRSSGGKPRAFLALPGRSHAPDPIEDDSPVEKKPKSREFVSSSSSSSSWGSSSEDEDDEPRRVSVGSETTGSRSGREHAPSPSNSDDSDSNDGGSTKQNIQPGYRSISGPDPRIRKTKRLAGEPGRQRQKSFSLPRSRTPIIPPVSGPLMMPDGSPWPGSAPLPSNRVRFGPSGETREGHWEDEAVRAARARYEASTEPVPLYVPELGDPARQYRALINLIYCPDRDPIAWLQNPKLTGVNSALNQFYQKLLPPGRAGTAVTGSVASPVPHVGEAMATGEALWALPHAAAAVAMSRRYDRAQKHFILQSLRRAFASMAYPEATGSSPAARISRGHPSPTTPATQAPDPQPSAAARSLSVCPPDDRLRTPRKRKSQPVESRSLLDKIRETPVADARVADDHVVSKAKRRVSEPVTITSGPVVDPPAVITMPLDGPAPNGGFRRIPRGALHTPVPSDQARKAYCTPETIARLVDDPLFPTAWRPALSFDPGALAEIAARRPGGGDRRFGPPSGVEALRRRCAWMRQIPDPEDVRLLIIYDPLPGEDINGPLESTLATDPGPSWSPSRGGLSVVLAALSNRLCLPSTHAWAGNWTGPPDVSALNARGVLLLSTRDLAFAGAVEYLGSRLASARRRLLVLDAVALERWPRDGPALSQYHVYVRAPARPDAQAVVRWPDSAVTEGLARAVFASSRTFGPASFARIETAFANLYPGEQPLCLCRGGNVAYTVCTRAGPKTRVPLSPREYRQYVLPGFDGCKDLARQSRGLGLGAADFVDEAAHSHRAANRWGLGAALRPVFLPEGRRPGAAGPEAGDVPTWARVFCRHALLEPDPAAEPLVLPPVAGRSVALYASADEARNALPPIPRVMWPPGFGAAETVLEGSDGTRFVFGHHGGSERPSETQAGRQRRTADDREHALELDDWEVGCEDAWDSEEGGGDDGDAPGSSFGVSIVSVAPGVLRDRRVGLRPAVKVELLSSSSSSEDEDDVWGGRGGRSPPQSRG

SEQ ID NO: 39 - DNA, 1002 bp, Varicella zoster
  CDS (1)..(1002)
atgcatttaaagcctaccagatttttccacgcaaaccaaccgccaatgccgcattcatacgagatggaggacttatgcttcgacgacatgcaatatcgctggtctccctcgaacacaccctatcgaagtatgtctaggcgatataaatccgtatctcggagcgggccttcgatgcgtgtacgctccagaacgccatgccgccgtcaaaccattcgaggaaaacttatgtcaaaggagcggtctgtgtaccgccattattttaattacatcgcaaggtcccccccagaagaactagctaccgttagaggcttaatcgtgccaattattaagacgacccctgtcacccttccgtttaacttgggtcagacagtggcggataactgcctgtcgttatccggaatgggttatcatttaggtctcggaggttattgtccgacatgcactgcatctggagaaccgcgtctatgtcgaaccgatcgggcggctctgatactagcatatgttcagcagcttaacaacatatacgaatatcgtgtgtttcttgcatccattttggcgctatcagaccgagccaacatgcaagcagcgtccgctgaacccctattgtcgagcgtattggcacaaccggaattattttttatgtatcatattatgagggaggggggcatgcgagatatacgcgtacttttttatcgtgatggagatgccggagggtttatgatgtatgttatatttccggggaaatctgttcacctccattacagactaatcgatcatatacaggccgcgtgtcgggggtataaaatagtcgcacacgtttggcagacaacatttttactgtcggtatgtcgcaacccagaacaacaaacagagactgtggtgccatccattggaacatcggacgtttactgtaaaatgtgtgaccttaactttgatggagaattgcttttggaatacaaaagactctacgcattatttgatgactttgttcctcctcggtga

SEQ ID NO: 40 - protein, 333 aa, Varicella zoster
MHLKPTRFFHANQPPMPHSYEMEDLCFDDMQYRWSPSNTPYRSMSRRYKSVSRSGPSMRVRSRTPCRRQTIRGKLMSKERSVYRHYFNYIARSPPEELATVRGLIVPIIKTTPVTLPFNLGQTVADNCLSLSGMGYHLGLGGYCPTCTASGEPRLCRTDRAALILAYVQQLNNIYEYRVFLASILALSDRANMQAASAEPLLSSVLAQPELFFMYHIMREGGMRDIRVLFYRDGDAGGFMMYVIFPGKSVHLHYRLIDHIQAACRGYKIVAHVWQTTFLLSVCRNPEQQTETVVPSIGTSDVYCKMCDLNFDGELLLEYKRLYALFDDFVPPR

SEQ ID NO: 41 - DNA, 1533 bp, Varicella zoster
  CDS (1)..(1533)
atggatgctgacgacacaccccccaacctccaaatatctccaactgcaggacctttgcgttcccaccacaataccgacggacatgaaccaaatgcaaccgcagccgatcagcaagaacgagaatccaccaaccccacacacggatgtgtaaatcatccatgggccaatccgtcaactgcaacatgcatggaatcaccagaacgatcacaacagacaagcttatttttattaaagcacggcttaacgagagatccaatacatcaacgcgaaagggtggacgtttttccacaatttaacaaacccccatgggtttttagaatttccaaattatcccgtttaattgtacccatcttcacgctcaatgaacagttatgtttttctaaattacagattcgagatagacccaggtttgcgggacggggaacgtatgggcgtgttcatatatacccatcgtcaaaaatagctgtaaaaaccatggacagtcgtgtttttaatagagagttaattaacgcgattttagcgagtgagggttctatacgagcaggggaaaggctaggtatttctagcatagtttgccttttaggtttttcgttacaaaccaaacagctactgtttccggcatacgacatggatatggatgaatacattgttcgcctgtccagacggttgacaatacctgatcacatagacagaaaaattgcccatgtatttttagatttggctcaagcgttgacgtttttaaatcgaacgtgcggcctgacccacctagatgtgaaatgtggcaatatttttcttaacgtcgacaactttgcctcgttggaaataaccacagcagtaatcggagactatagcctagtaacattaaatacgtattccctttgtactcgagcgatatttgaagttggaaatccatcccacccggagcacgtactacgcgtaccccgggatgcatcgcagatgtcatttcgtttggtgttgagtcatggaacaaaccaaccccctgaaatcttgcttgattatattaatggaacgggccttactaaatatactggaaccttgccccaaagagttggacttgcgattgatctttatgcattgggccaagcactcttagaagttatcctgctaggacgtcttcccggacaactgcccatttcagtacatcggaccccgcattatcactactacggtcataagttatcaccagatttggcgcttgatacgctggcatatcgatgtgtcctggcgccatatatactcccatctgacatccccggggacttaaattataatccctttatacacgccggagagctgaacacccgtatttcccggaattctttacgccggatattccagtgtcacgcagtgcgttacggcgtaacgcactcaaagcttttcgaaggcatacgcattccggcctcattatacccagccactgttgttacatcgttgttgtgtcacgataattcagaaatacgctcggatcaccctttattatggcacgatcgggattggataggatcgacataa

SEQ ID NO: 42 - protein, 510 aa, Varicella zoster
MDADDTPPNLQISPTAGPLRSHHNTDGHEPNATAADQQERESTNPTHGCVNHPWANPSTATCMESPERSQQTSLFLLKHGLTRDPIHQRERVDVFPQFNKPPWVFRISKLSRLIVPIFTLNEQLCFSKLQIRDRPRFAGRGTYGRVHIYPSSKIAVKTMDSRVFNRELINAILASEGSIRAGERLGISSIVCLLGFSLQTKQLLFPAYDMDMDEYIVRLSRRLTIPDHIDRKIAHVFLDLAQALTFLNRTCGLTHLDVKCGNIFLNVDNFASLEITTAVIGDYSLVTLNTYSLCTRAIFEVGNPSHPEHVLRVPRDASQMSFRLVLSHGTNQPPEILLDYINGTGLTKYTGTLPQRVGLAIDLYALGQALLEVILLGRLPGQLPISVHRTPHYHYYGHKLSPDLALDTLAYRCVLAPYILPSDIPGDLNYNPFIHAGELNTRISRNSLRRIFQCHAVRYGVTHSKLFEGIRIPASLYPATVVTSLLCHDNSEIRSDHPLLWHDRDWIGST

SEQ ID NO: 43 - DNA, 246 bp, Varicella zoster
  CDS (1)..(246)
atgggacaatcttcatccagcggtcgaggaggaatctgtggattgtgcaaacggtacaacgagcttgttacgtgcaacggagaaaccgttgctttgaactcagagttctttgaagactttgactttgatgagaatgtaacagaggacgccgataaatccacacaacgccgcccacgagtgatcgatgtaacaccaaaacgaaaaccttcgggaaagagctcccattccaaatgcgcaaaatgttaa

SEQ ID NO: 44 - protein, 81 aa, Varicella zoster
MGQSSSSGRGGICGLCKRYNELVTCNGETVALNSEFFEDFDFDENVTEDADKSTQRRPRVIDVTPKRKPSGKSSHSKCAKC

SEQ ID NO: 45 - DNA, 735 bp, Varicella zoster
  CDS (1)..(735)
atgaaaaatccgcagaaattagcgatcacattcttgccgctctacgtgatcccaacgtacacgttgtgtattaaagcattgtataaaaacacgcatgcgggcttgctgttctcatttctaggttttgtcttaaatacacccgccatgagcatctctggacccccaacgacgtttattttatataggttacatggggttaggcgggttcttcactggactttaccggatcatgaacaaacactctacgcatttacgggtgggtcaagatcaatggcggtgaagacggacgctcgatgtgatacaatgagcggtggtatgatcgtccttcaacacacccatacagtgaccctgctaaccatagactgttctactgacttttcatcatacgcatttacgcaccgggatttccacttacaggacaaaccccacgcaacatttgcgatgccgtttatgtcctgggtcggttctgacccaacatctcagctgtacagtaatgtggggggggtactatccgtaataacggaagatgacctatccatgtgtatctcaattgttatatacggtttacgggtaaacagacctgacgatcagaccacaccaacaccaaccccgcaccagtatacatcgcaaaggcggcagcctgaaaccaactgtccttcttcaccacaaccggcctttttcacatcagacgacgacgttctttcgttaatattacgggacgccgcaaacgcgtaa

SEQ ID NO: 46 - protein, 244 aa, Varicella zoster
MKNPQKLAITFLPLYVIPTYTLCIKALYKNTHAGLLFSFLGFVLNTPAMSISGPPTTFILYRLHGVRRVLHWTLPDHEQTLYAFTGGSRSMAVKTDARCDTMSGGMIVLQHTHTVTLLTIDCSTDFSSYAFTHRDFHLQDKPHATFAMPFMSWVGSDPTSQLYSNVGGVLSVITEDDLSMCISIVIYGLRVNRPDDQTTPTPTPHQYTSQRRQPETNCPSSPQPAFFTSDDDVLSLILRDAANA

SEQ ID NO: 47 - DNA, 124884 bp, Varicella zoster
  CDS (5569)..(6405)
  CDS (6553)..(7095)
  CDS (12245)..(12553)
  CDS (15752)..(19684)
  CDS (20400)..(21803)
  CDS (23666)..(24583)
  CDS (25259)..(25474)
  CDS (31035)..(32030)
  CDS (54592)..(56217)
  CDS (60132)..(60908)
  CDS (60975)..(62714)
  CDS (62747)..(64564)
  CDS (74249)..(77833)
  CDS (80267)..(80737)
  CDS (80864)..(81673)
  CDS (81747)..(82454)
  CDS (94410)..(95861)
  CDS (96040)..(98367)
  CDS (98392)..(99312)
  CDS (101091)..(102317)
  CDS (102407)..(103627)
  CDS (103772)..(105454)
  CDS (114218)..(115408)
  CDS (116308)..(119559)
  CDS (119611)..(120633)
  CDS (120744)..(122102)
  CDS (122438)..(122977)
  CDS (123970)..(124296)
cctctcccggggtccgccgggcgcccagaaaccgggggggggttattttcgggggggggtccgaccagcccgcccgtcgcccgcccgcacagacagacagacacttttttcataaaaaccgttccgcttttattaacaacaaacagtccgcgcgccagtggcgctcacgagaaaaggaggggactccgtcacccccgactctgcggggggctcctccccccgcgccctccccacacatcgtcctcgtcctcggaggacgaggacgaggacaacagctccaccttgaccgccgggcgcaaacccacccggcggtctcgcagcacacccggggccaccgacacgatgctcaccccaaaggatgaccccggtgcgtccccgtcgtccccgcccccctcctcgctgtcccacgcgtcttcacaccccacctcccaatcgtccagctccaaagcgtgttctctgtcgtctgcggtgcgccgctgtcgccccgcctgggtttctgacggccgttccgagcccccgtggtgtccgaacacgaaccgtgttccgtcgctcccctccaacaccgtctccgcggccccaaaaccgggcggccacattactctgggaatcggggggagggcattccgagcctcgtccgccgacgcatacagcgccaccgaccgaccggccacgggtggaagcacgagtggttctgcggcagggtcgggttccagcagggcgtggcggcaaaacaccctcgcccaggtgggtacgtcgccggcctccggcccggcggcccccggtctccgtccctcgggaaggaagacgggtcgaagcgcggcacccaggccccatcggtttgctgcgcggtggctatgtgccgcctcgtccacaaagtcggctgccccgagccccagaccccgagactgtcgcgcgaggtccttgcaaccgtcaaaacccggcagcacgtactgccggtattcacggggcgacagggggacgcgggtcttggggcccgcgcgggtacacacggtgtatgcgacgttcccaccgcggcacaaacacaggggttgttcgcccgggtacaggttggcaaacgcagtctcgatacgagcaaaactcgctggcccaaaggtgcgcgacgatgcaaacacggcccgggcgagtccttctgtgaccgccgagtctggccatcggacgacggcctgggcgtccggtcgcgccggggcccggacgtacacgtgatactgagacaaagcgggtccatccctgggccacctctcgagggccaccgcgtccaacaccagcaaccggcgccgggcagaggccaaccgcgagcctagatactcgacggccccggcaaaggccaggtctcgggtcgacagtaataaaacgccccgggcgttcaaagcggacacgtccggcgggccggtccagttcccggcccaggcatgagtgctcggcaggcacaaccggttactcagggctgccaggaccacagacagtccccctcgggatggactccatgacggtcccggatctgtcgcgagggtgctctcgagggggccgttgatgtcctctccgggcaacggatcgtagatgatcagaagcctcacatcctccgggtctgggatctgccgcatccaggcgcacctccgtcgcagcgcctccactccgctgggtggaccaaaccgtcggtctcctccgcccggacgccgagcggcgatttccgccaaggcgccgggatcaaagcttagcgcagggcgccaggccgtgggaaacaatgggtcgtcgaccagacgggcgatggtttcgggggtacagtacgccttgcgagcctggtccgacgggaccggggtatgcagggccccccggggaatacgccgaaatcccccgtttggggccggtccgtcaagtggcatcgttattacggcggggggatccaccacagggcccgaggtgatggtcacgggctcggatacccgcctcttggccttggaaaccacatgatcgtctgcaacccgggcgtccgcgacgggtgtctccctaatcttgtcgaggaggcttctgctctcgactggctgggacttgcgcttgcgcggagttcgtaaacgatcatccggtggacacacagaaagagagcgtgcggcggccgacggctgagggtcgggagcctgtgtggccggggttgttggagaagggtgaccgcgggagatccgcgccgccggactggagcccgttgcctcggggtatgccatgctggcaaaggctctgcggagactctgtaggataaagtgtttttgggcccggtcgtatcgacggctcatagccacggccgcggccgcgtgggggagagcccagagggcctcccccgtggccatggcttcgcctacatgcggaacgggagacgctacgctccccgtaacggcggtacccgcccgtcccggtggcaacagcttttggtagaactggttcagggccgagttgacaccggtcagcttggggttctggagccatgctatagggtctctgtctggacagtagatcaggttaatcagcgcgcggtactgtctagccggatctcccaactccggcacgtaaagcggcacgggttccgttgaggcctcgtaacgagcccgcgccgctctcacagcctcatcctcccagtgaccctctctggtctccccggacggtccaaaccgcaccctgttggatgggaggggtgccgatccgggccaagggcttccgtcgggcatcatgagcggccccgacaccgggggaattatcggggttctggatcgcggcagggaaaatgatttctgtctctggcgccccggttcccccgcaagacgtttggtcttacgaatcctcggatcgggaccgctgatggatcgatatcccggttggatattttgtttcgtcgacccaccatcatttgagtccgaatcatccgaatttgacggggaaggggcgtgttcgcgtccggacctgctgcctgtagtttcacttcccaccgaaacgcgccggggttcatcgtcttcatcctccgatgacgatccccacgacgaggaagaggatgaagacgaaacaaactcacgactctttggctttttctccactgggctgtcatcctcaatcgggtctggtgcgtgggatcttcccggcagggccaaaaacgctctaggtttgccccccgacgaacgtccagggacgcgaggtgttataccccgggcatcatgtttccttgggcgggtatcatcggtctcaaacggcaggtccgcctttgcccccttagcgggaacgctgtccgaaaggacgtggtacaattgctcaaccgggccgggtacaggtccaccgggtttccgcgccgggagtgggaccttaaccttcaaagtctttttcttcgggctctttccctgagcgggccgttgagttttctggagaactactccgtcccccgatgcatgcgcatgacccgcttgctcatcgcccggctttttacccgagatggactgagtttgtctgtctcgatggaccaccgacggcaaacctggtgaatttcctctcgtcgtttgtcggggtatagaccgctggtcttcccgttgatcgttcccggcggcgtctccaacaggagacgcgggggatacaggggagaaggcctgcgggaacggaggggtcgtacctctgcccgtttccccatcgttcatcggtggttttggagacctagcaagcttcgttccgagagagactgtctcaagggagcgatcggctcctgttggttctcgcgcgccggcctccgagaatcgggtgtggaagacctcggccagcgggattacaggcgagcccattagatcctgaccgtcctcgcatacgtagtcgtcttgtgttagctcttcgccaacatcttccgttctgggttctggttgaagtcccgatacggagggaattgaaacgatctcgtgttcccgtcccaccatgaccccgttctctccaaatagtagatcgtcaggctgactcgaggtgaccacccgggccctgtgttcggcggccgccgcggccgcgtccaacaggtccattaactccaaagtatcaggcgaccccgcgcgttggggtgtagagcgctgcatcggcggcgtatccatcgcactggggtgaatttagacgtacccgagttttccaaacgctctcgcagccttcaaaggattgcgattgcggttggtgagggagttccaacagtacttaaaacgtgttgtgcccccccctcgaccgcatatttcctccccgtgtcgtcaccgtgtaaatattcttaatgataagacgatgtagtgattggacgagactcgaggcgggaagttcatggaccatagtatgcgtttaaggagagaccgctggttggcgatgtacgcccggtgtctatttccgcataccttacaacatcataacaagggataccagacatgtgaatttcatttacatatgtttaaataacaaccaatcatcgtgtgtctacagacgatatataatatacataaacacaattggggttgtctcacatgcaaaacatcttatataacacgggttgtttccacccatccggcatctagttaatcaaatgcacgtcgacggtgtgtttgggtccctctccgtcgtcattacgttcgcgcaatcaacaagcgtatacaccaccacccctcccaacgattatgtcaggcggcacgaagcccgcgataacccataaaatacacacggggttgtggtgttcacgtaaccccccgccgatggggagggggcgcggtaccccgccgatggggagggggcgcggtaccccgccgatggggagggggcgcggtaccccgccgatggggagggggcgcggtaccccgccgatggggagggggcgcggtaccccgccgatgtttataaccataattctctaaaccgttgtagaaaatcacaaaaaaatttattcaaaaacaagtcgaagaacttcatatctgaggcatgtaaacccgttcgcacttcctggggtggaatggggtggggtgggggggtgaaaaagggggggggttaaattgggcgtccgcatgtctgtggtgtacgccaatcggatacactcttttgatctgcattcgcacttcccgttttttcactgtatgggttttcatgttttggcatgtgtccaaccaccgttcgcactttctttctatatatatatatatatatatatatatatatagagaaagagagagagtttcttgttcgcgcgtgttcccgcgatgtcgcggttttatggggtgtgggcgggcttttcacagaatatatatattccaaatggagcggcaggctttttaaaatcgatttgacgtgataaaaaaaaacacacggggcccccccctttttttggtgttataaaggcaacccaatcgaaggtctcccgccccggaatcccccattgccattttacccaagtagccttattcatagatgtaaacgtttgggtgtgtgttttgttgtgcagggttcgtccgattcataacgcgacagcgtcgagtcggttttaagggaaaaggttactacggccccaaggacatgttttgcacctcaccggctacgcggggcgactcgtccgagtcaaaacccggggcatcggttgatgttaacggaaagatggaatatggatctgcaccaggacccctgaacggccgggatacgtcgcggggccccggcgcgttttgtactccgggttgggagatccacccggccaggctcgttgaggacatcaaccgtgtttttttatgtattgcacagtcgtcgggacgcgtcacgcgagattcacgaagattgcggcgcatatgcctcgacttttatctaatgggtcgcaccagacagcgtcccacgttagcgtgctgggaggaattgttacagcttcaacccacccagacgcagtgcttacgcgctactttaatggaagtgtcccatcgaccccctcggggggaagacgggttcattgaggcgccgaatgttcctttgcataggagcgcactggaatgtgacgtatctgatgatggtggtgaagacgatagcgacgatgatgggtctacgccatcggatgtaattgaatttcgggattccgacgcggaatcatcggacggggaagactttatagtggaagaagaatcagaggagagcaccgattcttgtgaaccagacggggtacccggcgattgttatcgagacggggatgggtgcaacaccccgtccccaaagagaccccagcgtgccatcgagcgatacgcgggtgcagaaaccgcggaatatacagccgcgaaagcgctcaccgcgttgggcgaggggggtgtagattggaagcgacgtcgacacgaagccccgcgccggcatgatataccgcccccccatggcgtgtagtctttataaataaatacaatggtttggctcgtgtctttttttgatgtctgtctgtgggggagtggggtgttgtggatattagagggtagagggtgctggtttgaacgtctccattaacccacggggtccccacacgggccgtgtggtatgaatctctgcggatcccgcggtgagcacccgggcggtgaatatgccggactttactgcacacgacacgatacccccgcgcaccaggctctcatgaacgacgccgaacggtacttcgccgccgcgctatgcgccatatctaccgaggcctacgaggcttttatacacagcccctccgagagaccgtgcgcgagtttgtgggggagggcaaaggacgccttcggacggatgtgcggggagctcgcagcggatagacaacgtccaccctcggttccgccgatccgcagagcggtgttatcgttattacgcgagcaatgcatgccggatccacaatcgcatctggagctcagcgagcggctgatattgatggcatattggtgctgtttgggacacgccggacttccgactattggattgtcgcccgataataaatgcatccgcgccgaattatatgaccgccccgggggaatttgtcacaggctttttgacgcgtacctgggctgcgggtcccttggagtcccaagaacctacgagagatcctgacaccccatccctttatatagaaaaaaaaaataaatttaaaacatacaccggataaaagcgtactgttttttatttaaatttacacgctcggcgttgccccggttcggtgatcaccgggtcttatctatatacaccgtgtaactcgaacccccgtgactccctccaatcgcgttaccaaactcttcttccgtatccgtagattccgagtcctcgaaatcgtccactggaaggccagcgtaatacatgctttggttatacggggacttgtctaccctataggctttaaccctcattcgtttagccgtacagattaaaaatattacgagacataaaagtactactgctgcaagccctccggtccatgcggcatatcgtagaagtggtgacgttccggggtttacgggggtaatttccttgggtttagtagtcgccggtggctgaccggccgttggcggaaatccacgctcttcaattgcgtttacaaaatgatctactgtggatacaacagtgtatgctacggcttcaacatgcccgttaaaatacaccacaaaaacgtataatcccgacaaactctcgggtgtatctacaaactttaacgtggtgcccccgtcgtgtaagattagaccaaagctaggctccatatgagatattcccagacaatatgcggtgtagttatctgcatgttcacaattttgatacactgtgcttgcaacacgctgggctaaatgtggcgaggtaaatgtacaaccggaattcatatgagagaggcattggggtgcgttgggatgatacaaacacgtagaatataaccgcattggttgacatgtaggatcgatggggacatacaaccactctaacagcaaatcaaatggcgcttcatgtatcttatactgaagatgcattgccaagctaaacgtatcaccaactgaaaatacatgcgagtggtaattccacatatgaaactcagcccctcttggttgaggagttactgcgggcgtagggtttcttgttttttcatcccctttccaggtgaccaaaaacgtggcgtaggtagacgtaccatcggagccgcgcatgttccaaatgtacacacccaagtattgtttttctgtccgaagtactttcaagacacccggttcaatctcgggggggtctaattcgagttcatcaaacagtgtgctcgtgtttacaacaatccacggttggtccgcttccttcttaccttgaaaacggtaactgatttcggccaactgatcctctttagtattttccgcgcaatccacatccaccaccacgtcttgaaagcatgttgtatgttttaaacatatatgctggatggcgggcgctgcgtctcccgtacaggttaatgacggcaaaaagctccaagtctcggtgtaccggactccataaatccgctgaatcggtgcgcgtaaagtaaacgggtgattttcttccactgacacctcaatgagtctttggccttggggttttggattaagatctcctttaaacacgtcaccgtattgacgttggtccacatttacaattttatgtctgtcatcgccgtttaacgtagggataacgtggatgcccgtatcgtccccaagatcctcctgtgcagacatttgtgtgggttgcattaaccgttccccgctatcgataccacggccctgattatacaccccatggtgttcgtgtgcgttctctaaaaatccatcataatcattacgtggccatatataaggtgagttatgatcgtacgcttttcgcgaagactctccccgatttacccatgaagactccgcatgatctgaatggtagtaaggctcatatacggagtttgtatccagtttgtcttcatcggtgtgaaaatcatcgtatcgcaagacggatgctctgaccggattcgttatacgcaacgttcccgtgataattccgaaccccatcaatacccccaccacaggtttattaactgtccccatattacaggcgaccctcggaatatagtcacttaaaaccacgcaattcgcccgaggtctaaaaccatggactgctctcgtgtataccagctcggcctttaaggcttcataaaacatccccgcccaaatgtgggcgtgttaacttatagttaggagattcttaatccttcccctcatatcacaacgcgtaatcaaaacgctaaataaaacgcatatagtttatttaatataaaatccgggataattagttctatttaacaaacgggtttacaacggaatgtgggggggattcttcgcgaatcgttgctagttgtgcaatggcggcctccaacatcacatcggattctggtgtcgcattttgtatgccccttcttgtttttgtatttgggcgataaattggatgttttttaattctacgtcgcttaacgcttattacaataacaataaccatggcggtgaggatcatgacagacgctactataggaataattataagtagattttctggaggatcattaagggacttttcgggtaacgtggacatatccgttggatatacgtgattttctatcccctccttaacaacggacttagtttctgtcgtaacaacgtcctcatgtaaccaagggttatcctctaacgatttaccggcacgaagatcaagcatatgttgaaacagggaggtaccggaccctttgggtgtcgcgggtaaatcacacaaacgagcttgttgaaaaagggctcttgtagaatatccattctgtagagacggagaagtgtagataaccccgtgaatgttgtgatgcgagcccgctgtatatacatttacaccaagaatgaaaccatcggtggatctgctatggtctaaccgaacaagaagtacatacacaccagcatcatttattcccggtttggtaattttcaacattacaccagcatccggctctgttgatatccgatccgttgagttaccataatgccacgaatgtttgtacctacacgaaataaaagcgctcgttctaatccggggacatccgtcgtatcttattacttgtactgaccggaaacaaaacgccaccgtatccgcgtataacagttccagtgttccgctatagtttgtcccggtaggtagttgctctccaataaagacaagctgtccttttatctctgtataattatcattttgcatgggaataaggatagacgtgagactgctgttaacttgcaagctcacgtggtcgcccttgaagatcaaagcgttggtcacttgtatgtaaaatataacggccgatatcaaacattggattaaaaacatcgcgattaaatgaggcgcaccagtatacccaactacaccgaagagcagctctgtgagccgggggaggggacgcttttcagcgctactacaatgttaagaaaatgatcccgtgttttatccttgttgtaatggggcgtgactctgtattaagtttctattggttatgttatttatattagtatttcaaaacattgcgcgtttgtaccctatttgccttaacgggttatacgttataaacacaatttatacaatattttattaacaggcttaatgaattttaatctccaacttccattggatttggatatggatcgggaagagtttggaaaacagagtggttaagcaacacctctgctgatggtcgatgacgtgcgtcaaacgataacatcttacatatcaaatactccaaatcaattggcaactcatatagatttgtccacaatggcctggatccgggttttcgagaagaccgttttgccaaaccaatgtattgtcgacgaagatttgatgtagggttaatgggaaattcattgggatgagttccagatcgtcgtataataagtttaatttgacgctcactgtcacaattgccatctaaaccgtctcgttcaaataacgagttctgtcctgtagccatttcaaataatacaatcccggcactccatatgtccacggcaggtccatatggatctctagccaataactcaggagagtttgtggcgattgttccagcccagccataatacctgttggcattaatatccacggggaaacacgctgctccaaagtctcccacacaaacatcacctgggtggttaataaatatattttcagattttatatcacggtgaataatactgttattatgaagatactgtaacgcgcgtaatacagatcgctgaattgctaaaatgtcacatatggggaggttgcgctttgcagctagatagcagtataaatctgttcggtaacgtggtaatataagacatgtcattttgttatacgtaaacgttcctttaagctgtacaacggatgggtgggttaacgctcttaacacggttgcctcggtggccgttccttgacgttgacccgctttaatgaccacatgttcacatgttttactgtccatacacgcaaacgcaaaaccttccgcccctggtgtaaacgtttttaatattacaaatcccgctttattaattccaacgcgtgcttctgcgcacaatgccacagaggcttcggcttcagtttcgtgtacaccatcaaatatattaaaagactgtatatccatgttaacgtcataattgggatcatcctcagattctatgccgggcgacatttcaactggaaacatctgttgtataaacccacatgtttgcataatatgtgacggtgatgttgagatggcgccacggaactttccttgtccaacaaaggtgtctgttgcatcaacgtcgttcattatacttgtataccccgacttatgttgatagtgttaatgaaccaaaaacctgttgtccaacaactgtacaaaatatactcaccgacacacttataaagtgatccgattataagagggcggagataatgacaaaaaggggaggggttaaacataacttacaaatatggatttgattgttcctaggattattaataatgtctacatgttttatttaataataacgtaaggtaactttacctctttgtgagaatgtcggtatagctgacaacgtttatgaaaacgcgctttaaacgacctattgatgaataatctagaatcttgcatgtatataaatatcaaaaggtgtggtattaaacacttttaaactagcctgctggccttacaatctggatttctatggccggacaaaacaccatggagggtgaggccgtggccttactgatggaagcggtggtaaccccgcgagcgcaaccaaataatacaacgataacagccatacaaccgagccgttcggctgaaaagtgttattatagtgatagcgaaaatgaaacggcagatgaatttttgcgtcgaattggaaaatatcaacataaaatatatcatcgtaaaaaattctgttatattacgctaataattgtctttgtatttgctatgacgggagcggcctttgccttgggatatataacgtcacaatttgttggataagtggacgatttcgaggactcggaatctacggatacggaagaagagtttggtaacgcgattggagggagtcacgggggttcgagttacacggtgtatatagataagacccggtgatcaccgaaccggggcaacgccgagcgtgtaaatttaaataaaaaacagtacgcttttatccggtgtatgttttaaatttattttttttttctatataaagggatggggtgtcaggatctctcgtaggttcttgggactccaagggacccgcagcccaggtacgcgtcaaaaagcctgtgacaaattcccccggggcggtcatataattcggcgcggatgcatttattatcgggcgacaatccaatagtcggaagtccggcgtgtcccaaacagcaccaatatgccatcaatatcagccgctcgctgagctccagatgcgattgtggatccggcatgcattgctcgcgtaataacgataacaccgctctgcggatcggcggaaccgagggtggacgttgtctatccgctgcgagctccccgcacatccgtccgaaggcgtcctttgccctcccccacaaactcgcgcacggtctctcggaggggctgtgtataaaagcctcgtaggcctcggtagatatggcgcatagcgcggcggcgaagtaccgttcggcgtcgttcatgagagcctggtgcgcgggggtatcgtgtcgtgtgcagtaaagtccggcatattcaccgcccgggtgctcaccgcgggatccgcagagattcataccacacggcccgtgtggggaccccgtgggttaatggagacgttcaaaccagcaccctctaccctctaatatccacaacaccccactcccccacagacagacatcaaaaaaagacacgagccaaaccattgtatttatttataaagactacacgccatgggggggcggtatatcatgccggcgcggggcttcgtgtcgacgtcgcttccaatctacacccccctcgcccaacgcggtgagcgctttcgcggctgtatattccgcggtttctgcacccgcgtatcgctcgatggcacgctggggtctctttggggacggggtgttgcacccatccccgtctcgataacaatcgccgggtaccccgtctggttcacaagaatcggtgctctcctctgattcttcttccactataaagtcttccccgtccgatgattccgcgtcggaatcccgaaattcaattacatccgatggcgtagacccatcatcgtcgctatcgtcttcaccaccatcatcagatacgtcacattccagtgcgctcctatgcaaaggaacattcggcgcctcaatgaacccgtcttccccccgagggggtcgatgggacacttccattaaagtagcgcgtaagcactgcgtctgggtgggttgaagctgtaacaattcctcccagcacgctaacgtgggacgctgtctggtgcgacccattagataaaagtcgaggcatatgcgccgcaatcttcgtgaatctcgcgtgacgcgtcccgacgactgtgcaatacataaaaaaacacggttgatgtcctcaacgagcctggccgggtggatctcccaacccggagtacaaaacgcgccggggccccgcgacgtatcccggccgttcaggggtcctggtgcagatccatattccatctttccgttaacatcaaccgatgccccgggttttgactcggacgagtcgccccgcgtagccggtgaggtgcaaaacatgtccttggggccgtagtaaccttttcccttaaaaccgactcgacgctgtcgcgttatgaatcggacgaaccctgcacaacaaaacacacacccaaacgtttacatctatgaataaggctacttgggtaaaatggcaatgggggattccggggcgggagaccttcgattgggttgcctttataacaccaaaaaaaggggggggccccgtgtgtttttttttatcacgtcaaatcgattttaaaaagcctgccgctccatttggaatatatatattctgtgaaaagcccgcccacaccccataaaaccgcgacatcgcgggaacacgcgcgaacaagaaactctctctctttctctatatatatatatatatatatatatatatatagaaagaaagtgcgaacggtggttggacacatgccaaaacatgaaaacccatacagtgaaaaaacgggaagtgcgaatgcagatcaaaagagtgtatccgattggcgtacaccacagacatgcggacgcccaatttaaccccccccctttttcacccccccaccccaccccattccaccccaggaagtgcgaacgggtttacatgcctcagatatgaagttcttcgacttgtttttgaataaatttttttgtgattttctacaacggtttagagaattatggttataaacatcggcggggtaccgcgccccctccccatcggcggggtaccgcgccccctccccatcggcggggtaccgcgccccctccccatcggcggggtaccgcgccccctccccatcggcggggtaccgcgccccctccccatcggcggggggttacgtgaacaccacaaccccgtgtgtattttatgggttatcgcgggcttcgtgccgcctgacataatcgttgggaggggtggtggtgtatacgcttgttgattgcgcgaacgtaatgacgacggagagggacccaaacacaccgtcgacgtgcatttgattaactagatgccggatgggtggaaacaacccgtgttatataagatgttttgcatgtgagacaaccccaattgtgtttatgtatattatatatcgtctgtagacacacgatgattggttgttatttaaacatatgtaaatgaaattcacatgtctggtatcccttgttatgatgttgtaaggtatgcggaaatagacaccgggcgtacatcgccaaccagcggtctctccttaaacgcatactatggtccatgaacttcccgcctcgagtctcgtccaatcactacatcgtcttatcattaagaatatttacacggtgacgacacggggaggaaatatgcggtcgaggggggggcacaacacgttttaagtactgttggaactccctcaccaaccgcaatcgcaatcctttgaaggctgcgagagcgtttggaaaactcgggtacgtctaaattcaccccagtgcgatggatacgccgccgatgcagcgctctacaccccaacgcgcggggtcgcctgatactttggagttaatggacctgttggacgcggccgcggcggccgccgaacacagggcccgggtggtcacctcgagtcagcctgacgatctactatttggagagaacggggtcatggtgggacgggaacacgagatcgtttcaattccctccgtatcgggacttcaaccagaacccagaacggaagatgttggcgaagagctaacacaagacgactacgtatgcgaggacggtcaggatctaatgggctcgcctgtaatcccgctggccgaggtcttccacacccgattctcggaggccggcgcgcgagaaccaacaggagccgatcgctcccttgagacagtctctctcggaacgaagcttgctaggtctccaaaaccaccgatgaacgatggggaaacgggcagaggtacgacccctccgttcccgcaggccttctcccctgtatcccccgcgtctcctgttggagacgccgccgggaacgatcaacgggaagaccagcggtctataccccgacaaacgacgagaggaaattcaccaggtttgccgtcggtggtccatcgagacagacaaactcagtccatctcgggtaaaaagccgggcgatgagcaagcgggtcatgcgcatgcatcgggggacggagtagttctccagaaaactcaacggcccgctcagggaaagagcccgaagaaaaagactttgaaggttaaggtcccactcccggcgcggaaacccggtggacctgtacccggcccggttgagcaattgtaccacgtcctttcggacagcgttcccgctaagggggcaaaggcggacctgccgtttgagaccgatgatacccgcccaaggaaacatgatgcccggggtataacacctcgcgtccctggacgttcgtcggggggcaaacctagagcgtttttggccctgccgggaagatcccacgcaccagacccgattgaggatgacagcccagtggagaaaaagccaaagagtcgtgagtttgtttcgtcttcatcctcttcctcgtcgtggggatcgtcatcggaggatgaagacgatgaaccccggcgcgtttcggtgggaagtgaaactacaggcagcaggtccggacgcgaacacgccccttccccgtcaaattcggatgattcggactcaaatgatggtgggtcgacgaaacaaaatatccaaccgggatatcgatccatcagcggtcccgatccgaggattcgtaagaccaaacgtcttgcgggggaaccggggcgccagagacagaaatcattttccctgccgcgatccagaaccccgataattcccccggtgtcggggccgctcatgatgcccgacggaagcccttggcccggatcggcacccctcccatccaacagggtgcggtttggaccgtccggggagaccagagagggtcactgggaggatgaggctgtgagagcggcgcgggctcgttacgaggcctcaacggaacccgtgccgctttacgtgccggagttgggagatccggctagacagtaccgcgcgctgattaacctgatctactgtccagacagagaccctatagcatggctccagaaccccaagctgaccggtgtcaactcggccctgaaccagttctaccaaaagctgttgccaccgggacgggcgggtaccgccgttacggggagcgtagcgtctcccgttccgcatgtaggcgaagccatggccacgggggaggccctctgggctctcccccacgcggccgcggccgtggctatgagccgtcgatacgaccgggcccaaaaacactttatcctacagagtctccgcagagcctttgccagcatggcataccccgaggcaacgggctccagtccggcggcgcggatctcccgcggtcacccttctccaacaaccccggccacacaggctcccgaccctcagccgtcggccgccgcacgctctctttctgtgtgtccaccggatgatcgtttacgaactccgcgcaagcgcaagtcccagccagtcgagagcagaagcctcctcgacaagattagggagacacccgtcgcggacgcccgggttgcagacgatcatgtggtttccaaggccaagaggcgggtatccgagcccgtgaccatcacctcgggccctgtggtggatccccccgccgtaataacgatgccacttgacggaccggccccaaacgggggatttcggcgtattccccggggggccctgcataccccggtcccgtcggaccaggctcgcaaggcgtactgtacccccgaaaccatcgcccgtctggtcgacgacccattgtttcccacggcctggcgccctgcgctaagctttgatcccggcgccttggcggaaatcgccgctcggcgtccgggcggaggagaccgacggtttggtccacccagcggagtggaggcgctgcgacggaggtgcgcctggatgcggcagatcccagacccggaggatgtgaggcttctgatcatctacgatccgttgcccggagaggacatcaacggccccctcgagagcaccctcgcgacagatccgggaccgtcatggagtccatcccgagggggactgtctgtggtcctggcagccctgagtaaccggttgtgcctgccgagcactcatgcctgggccgggaactggaccggcccgccggacgtgtccgctttgaacgcccggggcgttttattactgtcgacccgagacctggcctttgccggggccgtcgagtatctaggctcgcggttggcctctgcccggcgccggttgctggtgttggacgcggtggccctcgagaggtggcccagggatggacccgctttgtctcagtatcacgtgtacgtccgggccccggcgcgaccggacgcccaggccgtcgtccgatggccagactcggcggtcacagaaggactcgcccgggccgtgtttgcatcgtcgcgcacctttgggccagcgagttttgctcgtatcgagactgcgtttgccaacctgtacccgggcgaacaacccctgtgtttgtgccgcggtgggaacgtcgcatacaccgtgtgtacccgcgcgggccccaagacccgcgtccccctgtcgccccgtgaataccggcagtacgtgctgccgggttttgacggttgcaaggacctcgcgcgacagtctcggggtctggggctcggggcagccgactttgtggacgaggcggcacatagccaccgcgcagcaaaccgatggggcctgggtgccgcgcttcgacccgtcttccttcccgagggacggagaccgggggccgccgggccggaggccggcgacgtacccacctgggcgagggtgttttgccgccacgccctgctggaacccgaccctgccgcagaaccactcgtgcttccacccgtggccggtcggtcggtggcgctgtatgcgtcggcggacgaggctcggaatgccctccccccgattcccagagtaatgtggccgcccggttttggggccgcggagacggtgttggaggggagcgacggaacacggttcgtgttcggacaccacgggggctcggaacggccgtcagaaacccaggcggggcgacagcggcgcaccgcagacgacagagaacacgctttggagctggacgattgggaggtggggtgtgaagacgcgtgggacagcgaggaggggggcggggacgacggggacgcaccggggtcatcctttggggtgagcatcgtgtcggtggccccgggtgtgctgcgagaccgccgggtgggtttgcgcccggcggtcaaggtggagctgttgtcctcgtcctcgtcctccgaggacgaggacgatgtgtggggagggcgcggggggaggagccccccgcagagtcgggggtgacggagtcccctccttttctcgtgagcgccactggcgcgcggactgtttgttgttaataaaagcggaacggtttttatgaaaaaagtgtctgtctgtctgtgcgggcgggcgacgggcgggctggtcggacccccccccgaaaataacccccccccggtttctgggcgcccggcggaccccgggagaggaggccagccctctcgcggccccctcgagagagaaaaaaaaaagcgaccccacctccccgcgcgtttgcggggcgaccatcgggggggacttgcattaccctatcccagtattgtttgtacgcctctaatggagtaactgtcccaatacacccgacttcctatatacagtgcttttgtttgtggacttacctttatttacgggtattacaggggggtggagaaatgtcttcgtatcgctctttatctaaataaagacagaatctaaaatgtcacttagctgtatacccggcccaaggttataccaatcaacttccctgtttgttgggactgtccgcctaccccaatacacattttatacccacgttttagtgggtgggacttaaaagaaatgggtggagggatataggggtgtgtcttcgttggtaccaattataaaaatgtactcgccacaactcacaatttagaacgcatggcagttctgctacgtgtttggatgcccggacattagaatacagccagttgttaccatggataccatattagcgggcggtagcggcacctccgacgcttcggataatacctgcaccatatgcatgagcaccgtttccgatctcggaaaaaccatgccgtgtttgcacgacttctgctttgtttgtattcgggcatggacctccaccagcgtccagtgtcctctctgccggtgtccagtgcaatccatcctgcataagatcgtaagtgatacaagttacaaggaatatgaagtgcacccatccgacgacgatggtttttctgagccgtcatttgaagattccatcgacatcctaccgggagatgtcatagatcttctgccaccaagcccaggaccgagtcgggagtccatccaacagccaacatcaagatcgagtcgggagcccattcaatcaccaaaccctgggccccttcaatcgtcggctagagagcccacagcagagtcaccaagtgactctcaacaggattctatacaaccaccgacccgagactcgagccctggtgtaaccaaaacatgctctaccgcatcatttttacggaaggtattttttaaagaccaacctgctgttcgatcggcgaccccggtggtgtatggctcgattgaatctgcacagcaaccccggaccggggggcaggactaccgtgatcgtccagtatctgtgggaattaatcaagacccacgaaccatggacagactgccttttcgagccacggatagaggaacagagggaaacgcgagattcccgtgttacatgcaacctttactcggatggcttgatgatcaacttgcggaactgtatcaacccgaaattgtagagcctacaaaaatgttgatattaaactatataggtatttacgggcgtgatgaggcgggattaaaaacatccctgcgttgtcttttgcatgattcaacaggaccgtttgtaacaaacatgttattcttgttggatcgatgtaccgatccaacccgcctaaccatgcaaacctggacctggaaagatacagccatccaactaattacaggtccaattgtaagaccagaaaccacctcaaccggggagacctctcgtggcgatgaaagggatacccgattggtaaatacaccccaaaaagtcaggcttttttctgtgttaccggggattaaaccgggaagcgcaaggggtgctaagcgccgtttatttcataccggcagagacgttaaacgatgcttaacaatagacctgacatctgagtctgattcggcatgtaagggaagtaaaacccgcaaagttgcctctccacagggggagtccaataccccctccacctccggatcaacatcaggttcactgaaacaccttaccaaaaaaagctctgccggtaaagcgggtaaaggtattccaaacaagatgaagaagtcctagtttgttgggagggggaaggaaatgccttaaacatccacagtctgctttattaccaactgtatgtaaattatgatcattaaacgtgcattttaaaaatacctgagtgttgctattggtcgtaagggttggtatatctggaacccaaggtgtaaatactgccccctggtaagtccgtacacgattcggaatgcccgcaatccggtctcggagtaaccggggcatcctgctctgcaaatacaataaacataacagtctaacagtacgcatgtgctgtcgtaagcgctccgccctaaattacaaaaatttgagattacgctcaatacttgtcaccgtttgtatttatacacctctacgggagcaaactaaaggtatacttggagatgcaaccaaggccgagttgagacgggaaaattagaagctgtttttccagcggcaaaaatcatccggtttgggtatgtcttatagcaattaaagttattaaaatggccggaaggtggcgggggtggtgaaggcgagggtaaagcaaacttgcggggggataaaaggcatatatgttacaaaatacgcacgcaaatataaattttagttttgtacttacagtaaaggcaacggtgttttcggtttaggcagccggacccgtttaaaatgccaactggatagtctgcaaggaggaaacgctgctgcaatgagtcaggtttttaggtgaattaggtatgatgcatcatttttgttaatggacttttaatggattgaaacggatagaaggaaacgtgtagcataatggatattggttgatattttaagcacgctgccaagtacgcactaagaatgcttagaaatatttaaactgaaatgcgtgggtttggcaaacgttaccgtaaatcaatctcagatccaagggataatggccgttgggcaggcctccaaaaggcaatttgagcgttttaagtttggggtacgtttttaaagcttgattggcaaacgttaccgcaaatcaatcttagatccaagggataatggccgttgggcaggcctccaaaaggcaatttgagcgttttcagtccgcttgaaaacggtctaagtatttgccgtaaatgaccgcgagaggtataatataaacatctgttttcccgatgacgtgttaagaaaagtgattatatcagataacgggggactgtaaagcttaatacgtgacatgtgattgggtgtataaatactacatccaaatcttgcatggaaattcgctttgtcggcacgccgtgacgtttgacatattaagatcgccctttttaggaaaatgagatatgacaccaagagtttaactaaaggccaactgtatatataaaactcatacttgtccatgcttccattagagtggtcaagtttttcaaaggatacgacaacgtcgtagtgaagggaaaacacaagcgtcatggcatcacataaatggttactgcagatagtttttttaaaaactatcacaatcgcgtattgtcttcatctccaagacgacactccgttgttttttggagccaaaccgctatcggatgtgagtttgattataacggaaccgtgcgtgtcatcggtatatgaggcgtgggactatgcggcacccccggtatcaaacctcagcgaggcgctatcgggaatcgtggttaagacaaaatgtccagtaccggaagttatactttggtttaaagacaaacaaatggcgtactggacaaatccatacgtcaccttaaaggggctggcacaatctgttggtgaagaacataaaagcggggacatacgcgatgctttgttggatgccctttccggtgtatgggtagactctactccatcttccacaaatatcccggaaaatggatgtgtctggggagccgaccgtttgttccaacgcgtatgccaatgaaatgaaactatcggattcaaaggacatttatgttttggcccatccggttaccaaaaaaacccgcaagcgaccccgcgggctgcctttgggggttaagctagaccccccaaccttcaagttaaataacatgtcacatcattacgacacggaaacgttcacccccgtctcttcgcaactggattcggttgaagttttcagcaagtttaacatttcccctgagtggtatgacctgttgtcggacgaacttaaagagccgtacgcgaaaggtatttttttagaatacaatcgtcttttaaattcaggggaagaaatacttccatctacaggcgatatttttgcatggacgcgattttgcggaccccagagcattcgcgttgtaattattggtcaagatccataccctaccgcgggacatgcacatgggctagcgtttagtgtaaaacgtggcataacaccaccgtctagtcttaaaaatatttttgcggccctcatggaatcatacccaaatatgactccgcccactcacggatgcctggagagttgggcaaggcagggggtgttattgctgaataccacgcttacggttcgtcgcgggactccggggtcgcatgtatacttaggctgggggcggctggtgcaacgcgtgctacagaggttatgcgagaaccgtacagggttagtttttatgctgtggggtgcgcatgcacagaagacaacccaaccgaattcaagatgtcatctggtgctaacacacgcgcatccgtcgccattgtcccgtgttccatttcggaattgtcgacatttcgttcaagccaatgagtattttacgcgtaaaggcgaacccgagatcgattggagtgttatataacactccaatcgaccctcttgcgtaccataatgttttcggagttgcctccttccgtaccgacggcattgcttcaatggggttggggattgcatcgtggaccgtgttcgatcccaaattttaaacaggtagccagccaacacagtgttcagaacgattttacagaaaatagcgttgatgcaaatgaaaaatttccgattgggcacgcgggctgtattgagaaaaccaaagacgactatgtaccatttgatacgttgttcatggtatcatctattgacgaacttgggcggagacaattaaccgacaccatccgccgcagcttggttatgaacgcctgtgaaataacggtcgcgtgtacgaaaaccgcagccttttctggtcgaggcgtgtcacgacaaaaacacgtgaccctatctaaaaataaattcaatccatccagtcataagagcctgcaaatgtttgtgttgtgtcaaaaaacccatgcaccccgtgtcagaaacctactgtacgagagtattcgtgcaagaagacctcgccgatattacacccgctcaacggacggaaaatcgcgtccgttggtaccagtgtttgtgtatgagtttacggctttagatcgtgtccttttacataaggaaaatactttgaccgaccaaccaattaatactgaaaatagcggtcatggacgtacgagaacgtaatgtgtttggaaatgccagcgttgccacgccgggggaacatcagaaatttgtacgcgagttaattttgtcgggacacaacaacgtcgtattacagacatacactggtaaatggtcagactgccgtaaacacggtaaatcggttatgtataataccggtgaagcgcggcacccaacctgcaaggctcatcaacgttaagaggataggtgtcttcaaattaaaagccgttaaatataaattttttgtgtcgtttattcgcgtatgaaatgtaatcagttgggataaatgttagtcttgaatctgtctttacgcgtttgcggcgtcccgtaatattaacgaaagaacgtcgtcgtctgatgtgaaaaaggccggttgtggtgaagaaggacagttggtttcaggctgccgcctttgcgatgtatactggtgcggggttggtgttggtgtggtctgatcgtcaggtctgtttacccgtaaaccgtatataacaattgagatacacatggataggtcatcttccgttattacggatagtaccccccccacattactgtacagctgagatgttgggtcagaaccgacccaggacataaacggcatcgcaaatgttgcgtggggtttgtcctgtaagtggaaatcccggtgcgtaaatgcgtatgatgaaaagtcagtagaacagtctatggttagcagggtcactgtatgggtgtgttgaaggacgatcataccaccgctcattgtatcacatcgagcgtccgtcttcaccgccattgatcttgacccacccgtaaatgcgtagagtgtttgttcatgatccggtaaagtccagtgaagaacccgcctaaccccatgtaacctatataaaataaacgtcgttgggggtccagagatgctcatggcgggtgtatttaagacaaaacctagaaatgagaacagcaagcccgcatgcgtgtttttatacaatgctttaatacacaacgtgtacgttgggatcacgtagagcggcaagaatgtgatcgctaatttctgcggatttttcatatcgttcccgtagagggtttagattcatttttaagaacctagaggagaccgtacgcgacatggcaacatacacactatttaggcgcagtttatccgccgtaaaacagatagctaccttctctaaactcagaccctgtgagcgtgcaattgtcatggctagtttagaactaaggccatagtccaccgtggtggccattgccaattctgcatcctctatagactcggtaaattcacatacgttagcgtttacgatggacacaaacccatgttgatcctgtaagaccataagaggtacgtgtagagcatataacatttcggtagtttcgcggtacagcttttttcgggtcagttcctctacaaagactggcacgggtgcaaaagtataccccaaaagggtatacgtatctgtttgtaatgccaaagataacagccccccccgcacattgccgatcaaaagctcgcttccgttgaaattaacattatcgacatacgcgctaaagggggcggttgtaaagctgctttcgaaaagctctgctaatatggcatatcgaccatcgtaaatagctttcattaacagaaactgagcatggacctcattggatgatttgggataggaaaattcgtactggcagtataccaagtcaataacctcgtcgttaagtgccgtaaaaattacatcatccgggtcttcgggtatggaggccgttactttggactcgggggctttggtaaagcagaaggctttatcggcagaagtagctgcaccatcacagtcaatcccggcacccgccccattaaccgctgcttcgtgtaagggggctttgtttgttccagacaataactccagggttaaggcagctaaccgtttgtatgctaacgataccttatcgggatgtaggtttttatttaacaaaaaattgtaaaagttaatcaagcctccaaagattaggtttgacagaaaccggtaagcatattcgatggatgtctctcctcgagccttcacaaaggagtcgtcacgtaaaacctttgcaaacgattgaaatgtaccactgaatccaataactaacttacgtagtcttgtggttacaactacgagactatttagcacgtaagtgatgtctgtacgggctacaattaagtcgcgatttgaatgtgtttcgtatttaactgttcccatgtcatgatctcggctttgggaataattgtgcaaacgaccggagtttgcccgtatccaatgttcaacagaaagtccgggttgtcccgttaatttgcggtattcatcaaatgccgttagccggatgaatgtataagtcggtaaggcaaacacagaaaaatggtcatttttcgatagttttaaatgcgcgtgtaacttactcatatacgcgctcacctccttatgcgacgaatacagacgcgtccatccgggaagattagcaggattgttaatataggatgcaggtacaacaaatgtatcgaccagacgcgcatgtgcttcggtaataggtagcccgtactcaagcgtttttaaaagatttccaaaatcgtcctcttgacatcgtttgttattaataaagattgcccagttatgtgagatgttagtatattgacgcagagtttgattgcagattatatacgtgagtatattttcactaggagttacgtgtgaacgctgcatgtcatgttgaaaatgagattctaacgagtcagtttgggtgggcgaaccgacgcatactatgaccggttttcgaccgtttatgtactgagggctttgatatatagcattcaaaagccaccaacagtaaacaacggccgtgagaatatgacgccctagcaatcctgcttcatcaataacaataacgttgctccgggtaaaagccggaagggaaccgcatgcgataaacgcggttccggacattgagcctgtaggtttattaagcaaacgttcaattgcccacagggttttaaatgtcgatgttcctccgcgaccgtcgtcccccatttgaaacactcgttttgttatatcaattaaaacttcccagtagtatacaatatctcttttttgcaggtcctcaatagaagggggggtcgtagtccagttatatgcgtaacggcccagctgagcctgaatgtgatttccgcgaaaaccaaattcatgaaagattgtgtttatcggacgactcgcataagccgttgataacttagcatgaacattttgggcagcaaccctggtggatccggtaataatgcaatcgatagcttcgttaagcgtttggatacacgtgctttttccggagccggcatttccgctaattaaataaacggagaaggggagctcattcctctgcatttcaggaggcgcttgcagttcgagtaactgtttaaaccaacacaaccgcggaacacgttcttttggaatcgtaattgcggcaagttctcgaatccgtgagaggataggttgaatgctatgcatagaggtgaagtttaaatatacactgtcatcaaatccattgggcgtctctggattaaaaacgtttttgggtgaagaactgtctacagaaattgatcttttcatcgtggttttcaatggccgaaataacgtctctttttaataacagttccggtagtgaagaaaaaaggatagcaagttctgtttctattgaccagggcttgaatggaagtaacccaaatgaccaatacaagaacatgttcgatatatactggaatgagtacgccccggatatagggttttgtacatttccggaggaagatggctggatgttaatacacccaaccacgcaaagtatgttgtttcgaaaaatcctagccggtgactttggatataccgatggacaaggcatatatagcgctgtacggtctacggaaactgtaattcgccaagttcaggcaaccgttttgatgaacgcgttggatgcaactcggtatgaggacctagcagcagattgggaacaccacatccaacaatgtaacctgcatgccggggctctagcggaacgttatgggctatgtggagaatcagaagccgtacggcttgcacatcaggtttttgaaacctggcgtcaaacattacagtcatcgttacttgagtttctgcgtggaataaccggttgtctctataccagtggtttaaatggaagggtcggttttgccaaatacgtggactggatagcctgtgtaggtattgtgcccgttgtaagaaaggtacgatcagaacagaatggaacccctgcaccattaaatacgtatatgggtcaagcggcagaactgtcccagatgttaaaagttgccgatgcaacgttggccagaggagcggcggttgtcacaagcctagttgagtgtatgcaaaatgttgctattatggattatgataggacgcgtctttattataattataaccgaagattaattatggcaaaggatgatgtaacgggcatgaagggagagtgtttggtcgtgtggccgcccgttgtatgtggggagggtgtagtatttgactcacccttacagcggctttctggggaggtgttggcctgttatgcattacgtgaacatgctcgcgtctgccaagttttaaatacagcccctttgcgcgtgttaataggtcgccggaatgaagatgatagatctcacagcacacgtgcggttgatcgtataatgggcgagaacgatacaacacgggctggatcggccgcgtctagacttgtaaagctaatagttaacttaaaaaacatgagacatgttggagatattaccgaaaccgtacgttcctatctagaagaaacgggcaatcacattctggaaggaagtggatcggtggacacatcacaaccggggtttggcaaggccaaccaatcctttaacgggggggcaatgtccggaacaacaaacgttcaaagtgcgtttaaaacttcggtggttaacagtatcaacggcatgctcgagggttatgtgaataatttattcaaaaccattgagggtctcaaggatgtgaacagcgatctgaccgaaaggctccagttcaaagaaggagagctgaaacggttacgggaagagagggtaaaaataaagccatctaaagggtcacatattacaatggcagaagaaacacgtattgccgatttaaatcacgaggttatagatcttaccggcataataggggatgatgcatatattgccaatagttttcaatctcgttatatccccccttatggagatgatataaaacgtttgtctgagctatggaaacaggaacttgttcgctgttttaagcttcaccgggtaaacaataatcaaggccaggaaatttctgtatcatattcaaatgcgtcaatctcattactagttgcgccgtatttttcattcatattacgggccacccgattaggattcttggtaactcaaagcgaggtacataggtcagaggaagagttatgccaggctatttttaaaaaggcgagaacagagtcctatttatcccaaatccgaatattatatgaaatgcaggttcgcgcagaggtaataaaacggggcccacggagaacaccaagtccttcctggggtttgcctgaccctacagaagatgacgaaagaatcccggaacccaataaaataaataaccaatacatgcatgttggatataaaaacctatcccattttatgaaaggacacccccctgagaggttacgggtacacaaggtaaatgcagcggattcgaccttactggataaaattcgagcaaaccggaggcgcggggatggccgatgggatgtccggaataaatatacccagcattttaggttgcagcgtaacgatcgacaacttactaacacgagccgaagaggggttggatgtgagcgacgtgatcgaagatcttagaatacaagcaataccaagattcgtatgcgaggcgcgggaggtaaccggtttgaagccacgctttttggcaaactctgttgtatcactgcgcgtaaaaccggaacaccaagagaccgttttagtagtgttgaatggtgattcaagtgaggtgtcctgtgatcgttactacatggagtgtgttactcaaccagcgttccgcggatttattttttccgtattaactgcggttgaagatagggtgtatacggtgggggtgcctccgcgcctgttaatctatcggatgactctattccgcccggataatgtcctagattttaccttatgtgttattttaatgtatctggaaggcattgggccctccggggcatctccatcgctgtttgtacaattgtctgtatatcttagacgcgttgagtgtcaaataggacctttggaaaaaatgcgtcggtttttatatgagggagttttatggttgttaaacactctaatgtatgtcgttgataacaacccctttacaaaaacccgcgtattgccgcattatatgtttgttaagttactgaaccctcagcctggaacggcccccaatattataaaggctatatattcatgtggggtgggtcagcgttttgacctgccccacggaacccccccctgtccagatggtgtggtgcaagtacccccgggattgttaaatggacctttacgagattcggaatatcagaagagcgtatatttttggtggttaaatcgcaccatggtaacaccgaaaaatgttcagttatttgaaacgtataaaaattcaccacgggttgtaaagtaaataaaccttttattttaaggatgggttgttgcggcgtgtttttttgtcataaaaacaagaagttatatgaagcaaggggatcgtcagtaaatttcaatgatggacttgaaaaatcattatgagcatctagaagatggttaataatagtgacaaacgtgtgtataaggggcttgagatgagcagcgcagtctatggggggaatacaggcacacgatggtagcaattcccagtaaacaacagtaggaggtccatgtgggttgggattacgaaccataattatctgtcttggtttataatccttatcttgcatgtgtccgtatgtcagataagatgccggtattgcttttgtttccgaattttgctcctgaagactccagtataccggagtataacggcgatcaaaaacatgttcaaaaaaatcgacgtatgtttttctggcagcctccacaacttgtccggcccatatgtcgtataggacatggtcccatatgcaattttcctgtatccgttctcgaatttttgttgcggtacataggagtcctgaaagacgctcctttaaatctcgcgccgcctgacttcgccatggcacgccaactaaatccggaggcgtgtttgtttgtaaattccacagccagcttcccgtggtacaccaggtaaatgcgtgagtgtacacaccctcgacccggagtaccggttccatggcgggtgtaaagttaagacctagttgaattcgtaataagcccgtgactgctctttcgcaggtggccgctaaatttaaggccgaacaacgtgcctgatctgaacatacattgcgcgtatgtaaatcggtgaagattccccaaaatccatcttttatataagtacatatagcaaagccctgttccaaggccgtttgttcgacgcaaaggctaatttcattggctataaaaataatagctttgtatatactcgggagtatgtgccgtaaccccccaaaaaaagacaccaacgcgggttttaggcaccccattcctcgacgcattctagccaggacgattttgcctaatctaaaatgcatggggaacatagcgcagtatatcgtgggaaaaaaggcgctgaaatcaaactttgccatccaacgatcttgtagttgtacaggctgtttgaagacggtagatatccggcccgcgtcccaattgacagttgcatctgcatgtccagtatcttgagggatttgcccaataagatcctgcacccgcggaggtaaggggggatgctgtccccagggggctagataatgaaaggcctgaataccggttactggccacaacccatccgtttccatgtacatctccgtagccgtgcgaatagattcgacggctggagtttgtgtccgaagagtggtccatccgggaaatccgacagtacaaaagtagtctctgtcttcacccttcggattgagttccgggcctaaatacgcaaagattggacggacaaccccgggttttccaaacgccgccgcgtaccacagtctatatgttgctaatattgaaagggaagatgtaacggtggaatccgttgttaaacagtcaaaataacacggtaagagtacccttaccacaattgcgcgattgccactaagaaccaagcggcgttcttcaaggttaaacaaatcggaggtttggccttcccgctctatagggggggaaaacgtagacttatatttccgacgtatgtaggcctttggtgtaattacctccacgtctaaaggtgtttgttgctgggtgtcaccgttagatttaagtgcggtcaggcgggcgtaggctagcgacgtaccttgcgtgtgggcgttacatgcgctgactgctgaaacatcaatggccacgggaaaattagccctcaatactccggtagatggcgtgttgtcattattcaacgcgtgttcatcggggattgtttttaacagaagacctgtattcgtatcagtctcgaatgttactggcgaataaaacgatttaaaccctaatacgcgccgtaaagtggccagggcagtgccatggagacaacgccaggtgtctgcgttacccagtggttcaaggggccaggcgtctaacgcagccgaggacgccgccctgcagatagacgcaaacgttgccgcagaaacactccccccatgcctggagtagcgacataaatcctcttgttgtacggtaatttcggcaaacttagggacgtatttcccacatgagtttttgcataataagtagtataacacggaaagaccgttctgtgttaattgtccggactgtgtccaggatgtgtatatgcttgcggcacaaatgtgtccgctttctctaaccaaggtaatctgcgttgcgtccatagcttggttgtggttcagtgcattgttagaggccctttgtgttgtacagaggcttagtatttatgtaaccccccctatggatgtccatatatggtattaacgggttataaactttcaaaatttaccgccccgtttatccgcggccacgatcccggggacagttccgatagcgctaattgtagcatggcttcggcatgcggggccaagtgcatttgatgtgcttgaaaatacacgtggcgtgcccaagcgggggcagtaattttgtaacgctgttgagagaacgaatggcgctggctcataagcaggttatacaactggcggtaggtacgacatgcagaacgatccacgttaattgaatcaagtaaagtttctagatcttttttttttaggtttttcacacgagtacttcccggaaaggtctgggtacttttagttacgcgggcgccaaataattgttcccaaattaaacgaaatagagcaatgttatattcgtgttttgtagggattggacggaagcattgattatggcatccatctaagaatccggttgttcgccaaaccgggcggtttaatataatcttagcgtcagtaacgttacagcgcataacctcaaatattagttgagccagcgaatccccgtgttgattgaaaagtgtattaatgtccgtatccaaaacttgtgttacacagccttcggtggacggattccacttgagtgtttttgcaatataggcacaacggcgaaacagctcccaatgtgtggttaaatttggggcggtagttatagtcgcgatgctaaattccccggttttgtccaggacgggaaaccaaccggaagcgtagtgcgtgtatattttttgaaatacgtcaaatgcttccaacgcttcaggtattcgtatacacgcccccaatattgccgtattgactagtctaggctgttctattggacatgcaagggctttaaatactttaatttgttcttcggtattaattgactccataagatacttttccataaacgcggtaatgttatcggccataaatccggaagggccaaaatcggtcaagcagctgtcattgtcctgtctaagagaacgcatacaggaagctacggcgttagcgctatgtctgagatcgtgtataaatgcacaaaattgaactggggaaacgtccgttattggacccatgccatccaatacaaccaaaatttggttagaggccaaaagagtttgtaagatattaatgctatcggctaaactccaaagagagcatctctcgaaaaggtgtttgtatttaaatcttgagaagagatgggtgttcgagcgtgtaaatgcatttgcacatcgttgcctaaatgcacagcacagtttgttagttatttgggtgtgtgtaggaaaccattgaaatttatttgcgatggtaaagtttagtaacattggcgagaacaggggtccgcatctggtccttgagccatcgacgtacatcaaaacttcattaagtagcaataaacgtacacgccctaatgactggtagaccgataccatatccggcccatatgacattggctttatgtaagcaaacatgctatgaaaatgagccatgtcaaaactcaatccaacggtcacgacggtagtgtacaccaacacgcgaaaatgtttccattcgtttacattacataggggccgagttgagtttaaaataagaatagagtctgtaaatattgcacaaaactgagcaactagctccgaaaacgataaagttgatgaaaatatacagatgttatgcccacattgtaatcgtagtgctagttcgtcaaaaaatgttccacgtagttggtgtatggtacgtacatcctcgtgttcaggagatcgtttaatgactcgcacaagcgtgtcgatgcccatatcacgcaggatcgtgcaagttcttccggagaacccaactcccgcgtatgtacacacaattgtgtgtatgttttcatctccacgcaatccggagattaaatcaataaactgcgagtttactgtagcatccatcgcgataatttgagaacagcgatttaaaagacgatataataggctatcaaccgcggaaagacgtctcattgtgggggagtataattgtccaatcactgacattacctcatccagtattaatacgtcgtagctgtcgatagcttcgctggatacgcggtgtaggctttcaagttgcacaatcaaacgtttaaaacccataatatatgtctcggatgtcaaatatgttacgaatccggagaggcctgcatcgttaaaccgttgaatcaacgtctgggtaaagctacggcgacatgagacaaccagtacgctaatatctgcctttaacgcgtgttgaagccactcaagcaaggctgttgttttaccagagcccataggggcacgtacgacggttaccgggcgagtttgtgacataccaggttttattagttttactggaacatccaattgcagttccaggctaattcccgggtgggtgtgtttaatccacgaaaccagatcccctccatataacgcccgcgcgagctgtgtactggacgcatagacggcggcgttgctctccccggtgttgggagacatgggaactcaaaagaaggggccgcgttctgaaaaagtctcgccgtacgacaccacgacacccgaggtggaagcgttagatcatcaaatggatacgcttaattggcgaatttggataattcaggtgatgatgttcactttgggtgcggtaatgctcctggctacgttaattgccgcctcttctgaatataccgggatcccttgtttttatgctgccgtagttgattatgagttatttaacgccaccctagatgggggggtatggtccggaaatagaggtggatacagcgccccggttttgtttttggaaccacatagcgttgtggcatttacttactacacggctttaacggcaatggccatggcggtatatacactgatcacggccgcgattatacaccgagaaacgaaaaatcaacgtgtccggcaaagctccggtgttgcatggttagttgtagatcccacaacacttttttggggtcttttgtcattgtggttattaaacgccgttgtgttattattagcttacaagcaaatcggcgtggctgctacattatatcttggacattttgcgacaagtgtaatatttacaacgtatttttgtggacgcggaaaattggacgaaacgaacataaaagcggtcgcaaatttacgacagcagagcgtctttttatatcgccttgcggggcctacgcgcgcagtgttcgtgaatttgatggctgcgttgatggcgatatgtatcctatttgtatcattaatgctggaacttgtggtggcgaatcatctacatacgggactgtggtcatcggtgtccgtggccatgtctacatttagtacattgtcagttgtatatcttatagtatcagaattaattttggcgcattatatacacgtgttaataggaccgtccctgggaacgctcgtggcctgtgctacgttgggaaccgccgcgcactcgtatatggaccgattatatgaccctatatcggttcaatctccacggttaattcccacaactcggggaaccttggcttgcctggccgtgttttccgttgtcatgttgcttctcagattgatgcgtgcatatgtgtatcatcgacagaaacgcagtcggttctacggtgccgtaagaagagtacccgagcgggtacggggatacatacgaaaagtaaaacctgcacatagaaattctcgccgcacaaattacccatcacaaggctacggctacgtctatgaaaatgactcaacatatgaaacggaccgcgaggatgagctgttatacgagcgatcaaacagtgggtgggagtagcgtgggttgtacttgtaaacccccaagcaataaaacaaacattcacagtaaccaaccatgatttgatgtttttattagaacgtttatcagggtttatcagggtttaacattttgcgcatttggaatgggagctctttcccgaaggttttcgttttggtgttacatcgatcactcgtgggcggcgttgtgtggatttatcggcgtcctctgttacattctcatcaaagtcaaagtcttcaaagaactctgagttcaaagcaacggtttctccgttgcacgtaacaagctcgttgtaccgtttgcacaatccacagattcctcctcgaccgctggatgaagattgtcccatcgcaatgaccgcaatgctgatgtaatcgcgttgtttcctgtgtctttaagtatttgtgtcactctaggcacatcaacttcgataggcgttagaacggctataaccggaaccgcacagtggggtgggatagtcggccagttatattcgtaaatggcagccgcttgtgtatcgacgcgcaatgggactcccacctcgtgtggtcggcgcacacgtcctataaaggtgacaaggaagggccgtagttttagcgctggaaagtaaccggataatacataggtttgtacggcaatttgtttaaagttagcgtgccgcggattggcaaatacaggaatttgaagagccgtatctccagtggcccatgcaatggttgtaattgtccccttttgtatgtccggatcattaaatacccacactcgggatgagattgtccgattgaggcccaaatgatgggcgtcgagttctgtaagggccctcccacctttaaatcctaaacgtttccattcaacgtgatccgttattaaggcctcgcgtgtacttgggtttgctgagggtccaaagaagcttacacatgggttttttatagtatataaaaagtcccgtagatttgccattgtaggtctatttattaacgtggtgtacgtccgaccgagcgggttatttttgtcatctggatcaaagaggtatttagcacgacatttaatttcaaaaaatgaaatgtcggtttctgcagggtggggatttagggtgccagttaaagggtccctgtcacatacaagaacgtccaacgacgcgcctataagtcccgttcgaacgtcgattaaaagtccacattcatacgttccgattcttggtgtacccacaaggagacttggagatttggtattgagcatgtcaaaattaaaaaacttagttgtagcttctggcgttaaatgatcaggagtacggatatcagccggatctataaacaatgcttcaactatcgctcgtgccgccggttcgttggtttttccaaacgccattgccgccgcatcaccgtatgtgtctgtagtgttatggtggtaaaaccactgaggtggaatgacgggtccagatacactccatttaagagttgatgcggtgattaaatttcgtctgagtagtgtccaaatggcattgtcgccctgaccacgagtctccgattctattgttaatagaatacgtttaatgtcgtcttgggttaatttggatgctaactcttccggacgcggctcctgaggctgtgtggacgtcttaaagaacagtgcgttggtagaaccgggtgttgtgtaggttacatcatttggagactccagagttgttagaattttatacatgtgggataaacgaataaaaatacccgctgtcatcccgcgacagtccatgttcggtgatgtcttctgtagcgtgtctataaaatggtgttcaacgttaatcgtgttaatatccgtttttacaaaagggtgctgtagacctcccacacgggcaatttttttggctggctgggggcttatgtcgatcctatccaatcccgatcgtgccataataaagggtgatccgagcgtatttctgaattatcgtgacacaacaacgatgtaacaacagtggctgggtataatgaggccggaatgcgtatgccttcgaaaagctttgagtgcgttacgccgtaacgcactgcgtgacactggaatatccggcgtaaagaattccgggaaatacgggtgttcagctctccggcgtgtataaagggattataatttaagtccccggggatgtcagatgggagtatatatggcgccaggacacatcgatatgccagcgtatcaagcgccaaatctggtgataacttatgaccgtagtagtgataatgcggggtccgatgtactgaaatgggcagttgtccgggaagacgtcctagcaggataacttctaagagtgcttggcccaatgcataaagatcaatcgcaagtccaactctttggggcaaggttccagtatatttagtaaggcccgttccattaatataatcaagcaagatttcagggggttggtttgttccatgactcaacaccaaacgaaatgacatctgcgatgcatcccggggtacgcgtagtacgtgctccgggtgggatggatttccaacttcaaatatcgctcgagtacaaagggaatacgtatttaatgttactaggctatagtctccgattactgctgtggttatttccaacgaggcaaagttgtcgacgttaagaaaaatattgccacatttcacatctaggtgggtcaggccgcacgttcgatttaaaaacgtcaacgcttgagccaaatctaaaaatacatgggcaatttttctgtctatgtgatcaggtattgtcaaccgtctggacaggcgaacaatgtattcatccatatccatgtcgtatgccggaaacagtagctgtttggtttgtaacgaaaaacctaaaaggcaaactatgctagaaatacctagcctttcccctgctcgtatagaaccctcactcgctaaaatcgcgttaattaactctctattaaaaacacgactgtccatggtttttacagctatttttgacgatgggtatatatgaacacgcccatacgttccccgtcccgcaaacctgggtctatctcgaatctgtaatttagaaaaacataactgttcattgagcgtgaagatgggtacaattaaacgggataatttggaaattctaaaaacccatgggggtttgttaaattgtggaaaaacgtccaccctttcgcgttgatgtattggatctctcgttaagccgtgctttaataaaaataagcttgtctgttgtgatcgttctggtgattccatgcatgttgcagttgacggattggcccatggatgatttacacatccgtgtgtggggttggtggattctcgttcttgctgatcggctgcggttgcatttggttcatgtccgtcggtattgtggtgggaacgcaaaggtcctgcagttggagatatttggaggttggggggtgtgtcgtcagcatccattgtgtaagtaacgcttcgtcgtcttctccaaaccaagtatgattttcgtgttcgatgttcggtcctaccgcgtcttccagtctgtctatattatcggtattatcgtcttctgttttatccaaaccgcgaataaaatcgggtgctatatagcgtctgtttgtatttaaaatctgttgaatacttgtttgttcctcaaccttggattgtatatcacgaatcttctgttcaactgaagctatgcgagctgcagagcggagctggttatttaaatcggcgcaggcctcttttgcagcagtaaaggcatacacaaatgctggatcttgtacactcgcacccccacggattagatcgagggtccgttctttaaataaccccgcgcggttatgcgcctcaactagtttgacacggttacgcctatgagaagcgtaggttggagtgtggcctgacatgaccaaagtgaatgaatgcggccctgaaaatgtttatgatatatacgtaacgagtacgtaagatgacgcggcttcctgttttactgcttacaagagatgaggcggattccgtgaattgatgttaaatgtcattgataatgtttggtcgtacgcttggtgaagaatctgtaagatattttgaacgtctaaagcgtcgtagggatgaacgctttgggacgttggagtcccctaccccgtgttccacgcggcaagggtctctgggaaacgcaacccaaatcccgtttctgaattttgctatagatgtaacccgacgtcatcaggccgttattcccggaattggaacgcttcacaactgttgtgaatatattccactgttctcggctactgctcgacgggcaatgtttggcgcgtttctatcgtcaacagggtacaactgtacccccaatgtagttttgaaaccatggcgatattcggtaaatgcaaacgtaagccctgaattaaaaaaggctgtcagtagtgtacagttttatgaatattcaccggaagaagcagcacctcatcgaaatgcgtatagcggtgttatgaacacatttcgcgcgttttctctgtcggatagtttctgtcagttgtctacctttacacaacggttttcgtaccttgtggaaacatcttttgagagtattgaagagtgtggaagtcatggcaaacgcgcaaaggttgacgttccaatctatggcagatataaggggacgttggaactgtttcaaaaaatgatcctcatgcacaccacgcattttatttcatcggtgctattgggcgatcatgccgacagagttgactgctttctgcgtacagtgtttaacacgccaagtgtttctgacagtgttttagaacacttcaaacaaaaatcaactgtgtttttggtaccacgtagacatgggaaaacatggtttcttgtaccattaatagctttagtaatggccacgtttagaggaattaaagtgggttatacggctcatatacgcaaagcaacggaacccgtgtttgagggtatcaagtctcgcctggaacagtggtttggggcaaattacgtggatcatgtaaaaggcgaatctattacgttttcatttaccgacgggtcttacagcacagcggtgttcgcgtcaagtcacaacacaaacgtgagtgttttataaatttaacctttaatatattactgtaaatgttgacatatacctttccacaacggcggttgagttaaggtatactaggtggttgtaggttccggttcacccgataatctttgtgtctcggggaagcaaattcgctgaagcagaccacagccgttaataatagcccggcttaatgtttctccaaacatataaagctgccacccagatgaatttactggtacagagagaccactggcgttggttcccgctataacgtcgccaagatttgcggtaatgcgaggatttttagtactcgtaattcgaatgcaggtggtgacatctacaaaaagaacctgcgtggcgccaatgtctacctccacttttaattcccgctgaccggcctttctccacatacacggagcccaacacacacaaccttccgcatgatttgtgacatggggtaacgcatacagtgcccccacgtgaactctatgattacattcatcacatccgtccgcatggctgaggagtcgatttaatacagagccaagtatccgagcatgccatccggcgggacatagccctattaaattaggttccatagccagtacatataaacgccttcgttcgtctgaccaccacactcccggagaaataactttacatgcgtatggatttttcggaagccgcgggggttgtaagtagttgcttaagtttggcgttggtgtaagatctgcgggggtgggatctgctcgaggatccggaatagatgttggaagggggtacgcgatcgggttcttaaacgttgctccaaaaacatggtctatgttttcaaccggataaattcttaaagtcgccgtcattgcgtacgagacctcgtaattaaaatttacaattacatgaaaagtcttcggaggtaagttcatctgacgtgggcgcgtgatgtaaattgtggctacaacaacggcaatattagtagtatccgtttgaagggggataaacggagcgatccttaaagttataaaagcagttgatcgcattattttcacccggggatcggtcaggatggacttccataatcccatatccagcgttaatgcatcgcagagtctctgaactgcctcgggggttaatttgcgcgctgcacccgtagcggtgtacagcggaaatatgcgttgtaattccatgagcagaaaaacagtctagcggattgccgcccgggtacttgtgggtttaatgccacccacccggttattttatattttaagagggggtggaaacgggagaaatgacgtaaaattacatatgaagagattctggtgttatgtttttatagtgacactaatttatttatgggggttgggaatagagaagcagaatctgtctagaataggtccgattaacgatgcaggtagtgctgcctgtagggtatcggtaatacaaaaacatgccgcaaatccccccggtaaaactaaaatggattgtaattgctggttaaatcctagacaaatgtacgcgtaacattgaccgggtaaatacttagaacaaattccaatatcaacaatatccgcgctgcgtataaatttacccctcagttgtgtggaattaccaataccaaccttttctaaggctacgggaacggggaccttggaaagcttaagtatttcccctcctgaattataatagtcaaataaatatatagaacgattacctaaccagcatgggaaggaagcgtgaaggtagggtatataccccccaccttgtggtcgtgtatatacagatgacagatacgccaaaaccgcatacatcaaggagctgttataaaacgcatccattgacatttccgttaacaccgaaactatagtctgaatcaggtctggtgtgcgggctacaatttcatcaataaccgtttgggaagaatctgcaatatcatattccatgagttgttgtagagtcgggttcgtttgtaactccgttataagaccttgggttagcgatgtcacacacgcttgtttaaatacctggtttaaaaacatttcggcgcctggtttaaaggcgggtaagggggtttgattatttaggacgttagccaaaaacggtaaacgcgcgactagctcttggcgagctgtcacatgtaggctttggggattgtcaacccgggcatttatacacgcagcatcaataatagcctgtgcagagtgatataaaattggacttccggtaatacgtcctccccaggcagaggatccgttgtaagatactacaatcaacggactgggggattctgcgtaatgtcgcggtacaattgataggggacgccgtttccagaaatctgctggagtgtccccgctaactaattgggcataacagatgtcgaaccattccataagactttggggttctgtcgaagctggggtaaacaatagaacgtcttgtaaaggtgggatgctggcggacgaattgtttttctttcccgtaaatcgcccttgtccaggcggctcaaggacgccatcaaaggaaccgttattgatcggatctgtgttggaagtttgcgctccgtggccctttgcactttgaagcaacccagatgcaacgcgggaactagaaggtcggacggggtgcctggagttaacaatgtttacggcccgttttattagctcaaggacgtcccgattattttcctgtatgcgtgtttcagcaggggagtcatcaatacctccagaagttaactgtcgatcaagatcgattatggatgaaacgggtccaatattgtccccatttgacgtgtgtgattcacccatggctgccaccatatgctctgcgtatatttttatagacgatgcaagacgaggggtgcatcggatatacgcaatcagctgtttgcataataaaagtacccgttgtccatcagcaaaataacgcgttccgtttgggattagttctgcatacataatacaaatatcacggtgcttgcggtttccagtatttattcgtatcgctacaacgttaaatgcatcaaagaataaaccggggctaagataaacaggcaatgataaaatcaatccccctgaattatgcgtggccgaaaaaacgtgtgaaacaaatggttccgtttttggtattaagagatttgttaaggcgttatcgggaatgtacgcggcgaaaacttgacaccacggttcgcattgacctgtagcatgatatcttgtttgtacttcaaccttgaagcgttgtccgggtttctttaaaatcagtaatgcgggatctattccggccgcaataagccccgcgttaggtatcacaacgtgtagtaatccttttgtgtgatcattatgccaaagtgcatgtttggtttcatttgccaaatgggcttccattatacaccggatatggttgtactggaaaaaaaaaagaaatatgtacgtattcaaacattttttacgtacgtggtatttaaggatacatttaaactttggtggggtaactatatatctttctatcgttccagggtatccgaggtcaagattttaatcttctgtttgtggatgaagctaattttattcgacctgatgctgtacaaactatagtcggatttttaaatcaaaccaattgtaaaattatttttgtttcatcaacaaataccggaaaagcaagtacaagttttttgtataacttacgtggatcgtcggatcagttgttaaacgttgttacatatgtatgcgacgatcacatgccgcgtgttttagcacatagcgatgtcacagcttgttcgtgttatgtattaaataagccggttttcatcacaatggatggagccatgcggcgcactgcagatttatttatggccgactccttcgtgcaggaaattgtaggtgggcgtaaacagaattctgggggtgtggggtttgaccggccattatttacaaaaactgcccgtgagaggtttattttatatcggccgtcaaccgttgcgaattgtgctatattatcgtcagtgttgtacgtttacgtagaccctgcatttacctcaaatacacgagcgtctggtactggtgtagcgattgttggtcgttataagtcggattggattatatttggattggagcacttttttcttagagctttaactggcacgtcttccagtgagatagggcgttgcgttactcaatgcttaggccacatactcgctttacaccccaatacatttacaaacgtacacgtttctatagagggaaacagcagccaggattctgcagttgccatatcgttggctatagcacaacagtttgctgtcctcgaaaagggaaacgtgctatcttccgctccagtgttactgttttatcattccatacctcccggatgtagcgtggcgtaccctttttttttattacaaaaacaaaaaacgccggccgtagactattttgttaaacgatttaactccggaaatataatagcctcacaggagcttgtatccctaacagtaaagttaggtgtagaccccgtggagtatctatgtaaacagttggataacctgacagaggtaattaaaggcggtatgggtaatctagacacaaaaacttacacgggtaaaggtaccacgggaacaatgtcagatgatctgatggttgcattaattatgtccgtgtatattggcagttcatgtataccggattccgtgtttatgcctattaaataaaaacaagacgcgtgaaatgtaactagactggttgtgtttttattaacacctgtttacacttgaatcacggccgtgcggtctcccggatgaacagtagagggtccatcaaacacacagacgcgtaaaattgcgcgagttcccaaggtatcccccagtctagatgatgttgatatccaagatgaaatagtttcatatatgggaaatcggcgatggccgtcttgaatccgcggcattggcggtatattaattaactggccggtttctctaacgcaattggccgtttgtatcaataaatttacataaccgtcgtgtgctccttggactaacaaagttggaatcagcgccaataaaagcagacatccctcgtttatggaaaacattagatttaaaaccaatgtgcgaatagccgcatccgatccgtcccgatgttgtaaatttgtttcgagttcataacgccttccattgtaacaaatgacatccgcgcctcgtagaacttcgtggggtaaaatttgagcacccgcggccgtgcgctcaacggcccgtgcaaccactttggcgatgatttctcgcattaaggtctgggggatggttaaagggaaaacaatttccagtcctacagagtccaagcgaattgagtctgcggacccgaaaaccggaggaagtaagcagatgtaatcgccattacaaagatcaacgggggatgtattttgaataaacaacccgggtgtaggagtacccacgccaatggcatgcgccaacaactttcccgggatgacccgtgttataactgccgcgaatcgcattcggtatgcctctaacagcgagagcgtgtctggtggagcaccgttaatgtaatatgacgacagcgctatatccaccagtgaagctcgatgacgcagggttgagaaggtaataatttttccctcacatttctgtaatgcagatgtttccgccggggatagttctcctggtaacaatacctctatctcaaatggcatagccatgttgtttaaggaagcgtgaaacagaccaagtcggccgagcgtatccaaatctcaagtaagatgccaatgcgctctacagggcttttattgggagtgggtatgtgggcgtggtgaaattatcgcggaagaggaagacatcccctaaggggcgacgcgtctcgaatcagatattgggctaagtgaacttcatctgccccggtttctcccgcgtgagccgttcgtaacatggccgcatcgcttgagcatagtggtggatatgcttcttgaaaaaggccacacggatcctgtgtcatttcggtagaaccgggagggcgtttaaattgatattcagtgtcggtggagctttgcgacgccacagcctttgcctccattagaagccgatccagtgtattacaattagtgttaacctccgctggtgtaaaaaacttaaagcatgggctgtagataggagaagcgcctgtaaggttgtatgttccgttgtatagcctgtcaccgtatgaatgtttttgtgatgcccatgggttaagagttgctcgatctgtataagcaacatccgattgtgtgtgatcaaacattatagcctctatgtcggcgtcacggtcacccatatataacattccagatgctcgacctctaggattgcatgcagttctaaaatattgtaggtcagtggacaccggcatggccacaaactcacacacagaggcttgccctcgtgcaattcctgccgatgtagcaggacgtagtccgccgaagatgggtaggggttcggtgggatttaagcgaccccccgatgctgttatacgacgcaacgattcggtaacgttatcatgtaacattggcactcctcctcgtgaaaaaaaaagattttgggcagtattgcccatatccgtgagagggcatcgcagggctgctgtggcacatacagctgtatacccgactcccaggtccacgtgagctctgggttgggttagggtaaagtttacccccccaatagcatcatgatggtgtacttggatttgtccgacaaagtacgattcagaagcacgctcggcatataaaagttgctctgtggcaaagcgatcctggcgcactacggtaaaggcaatcccggggtgaaatcccgttcgtagttgatgtgtaagagatattggtgtaaacttaaaataccctccaagaagagaatatgtaagagtattaaaatccgacttactatgcgttacatggtaggcaacgggttggcgtatagttgcgtggtggttggctcccagaaaaggagggattggtggtaccatttttgccaaaacccgcctagcatttgtcattccacgcaatgatgccaaatgttccggacatgcaaacagagggttgaccggaacgggataaaaaaaagtacccgttgcaatggtttcatcgtacgcctgatatgccatcataataaggccatggtaaagcgctccgtcatatattctcatatttctggttgttgccgtggcggctcccgcatcgggggcgcttgatactaaaatggccgtcgttcgttcagccatatctcccattaactcttgtagtgtgagcaatgcatcaccatcaacggttaggtgtgcattatggaagtaaacgttaagagagttcggaacgagttggtgtgcgtgaagagggtgtcttggatcttctggggtagttggggcttcttcatcagcgggaatttccggaacgataactgcctgtaacgcagggtataggcgatcataacgcacgcccattgtacaacaggaaccgcgggaaaatgcaggaatgacaatatagtagtaaatcttggagagaataccccattcacggtcatggtgtggagtaatgggaataccctgacccgtgtctccccgaacgggtctcccgtggattaacacattatcgcgtcgttggaagttatgcccggccatatccacaaagtgaagggcttggtatccgtttcgcccgcttacacgaattgcggggagtcggtctcgggcggcttcatcacggtatattaacgcatcacaatcccatagaataggtgcaataaacgtgtcatccgtaaggatgttatttagcgcttccgaggtctcgccgttatggccctctccttgtattgtaaaatcggttatagtttggcgtaatgctcttacatgctgcagtaaatcccgatatatattaatacagacttcgggaagctcaccgtttccgagatatgtagttatgtacattaacatgtgaaagttatttacaaatgccaccctgtgggattgctcccaatacccgcgaatacactgtgttaacagtcgcagtaacgcacagaagtttctttcgtttccatgaataacagcctctagcatgtagaaaatagttgggtatgcgcggtcttcaaatgtatcctttacggctttaatggttgccggggtcattgtatgtcttcccaaaccgagttgggttccgcgacagtctcgaaatgaaatgggacatagaggcacgggaatgtttccgttgataatccgtaatgttgcgttaacggttggcatggcttccgggggacgctgcggtccgggaaggtctacgtcccccggtgcaacaaaaaaatcaaaggcggggtttaattcaaaccttagacgcgggttgctcggagctataaactgtagaattgttaaatgttcgtttacccaatgagggtgatgaggcatcatatctgcccacgtttccataaacctccccatttgaacatccaatgtgtcctctgtaccctcggccacgtatacaccaaaataacactgacgatctaaatgttgttggcggagggcaacaagtgtggcctcgacatcaagcaatgaactgtggcagatggtacccattgcatcacgaagagtcaactgtgttaatatcccatctttattataaaaaaaaatcccttggggtggaaattgacgtggatcctgttcggatacagttgaaaaatcgccggcgtgtcgtgtatatctgtccatggagtttgcctgaaacactcccattggcatgataaacgtaatatctatatttccaataagagggtaggcaacgcgcgtagcttggtagacccgccgttctaatgcttctaagaatacaagtttatccccaacaatcactaaatccgcaggaacacgggcgttaaccggaagcccagctgtcgttgaatcggagttggattgtgggggtatagacggtatgtttaacgtgttagggtcggttatatcaaggagatggcgggctacatcatccattccgcggacggcctttcccatcacaagggcggttaccaagtttgtcccctgtagaaccatttcgccatatgttactggtacgtcagcggcggtgtcgtcaatttgtaaaattccctgtaatagttgccgttttaaggttgctgttgttaccaacacaccgtcaacctgccgtccgcgagtgtttgtatgagttattcgtgataccatcaccgatggttgggtgcacgaaaccatatccgacagatacgcagagatcagcctaggttccctggcgtgtcgggtcataaaaaacatatccgcacagactctacgtttgaggtccgaaagtagggccgcgcgtgcaacacgatttagatgtccctcgggttggaatttattaattggtgaaagcagcgatagcggtggggctttctccaatagaacaccaagaagttgatcggcagtgcctcgttcaaatgagtccaaaacggtgcgtaaattacgagccatctgttggatagctcttatacgtaacgatgagtcaatctctgtcccatcgacatatgtgttacttaacaaactcaacgcttccgatgcaattgcaaacgcagcgcttaacgaacgcttgtgtatccgcttaaccatataattatgaacaggctgatcgacgggatgtgggccatcacgtgctatcatgggttgttgtacctcaaattgaataacgccatctcgcacgtaagccagctccggaaatttagtacagatgcaagcgacagacagtccaagttctagaaaacgcacaaagtttaatgtattgcagtatgtccccaaaagaatatcgaattgagccgagtaaaggctgttatcatctgatcgtatttgtttaaaaaaatcaaaaatgcaacggtgtgcacacacctctatggttgacagcacatttccagttggaatgatccccgctgggatgttaaataacccagcaatacgatcagattccgttgtagtaatcacgttagcgggacatgaaaccgttgtcattttgtcagcagcgttgcgacttgaatccggacgtgtaaacgtgtgcgggaacaagaaaactgcgagaagtttgatgtagagtggaacatatgtatgggtgtttccaagtaacacgggggcggtaattataaatacccaacattatttttagactgaacaattatagtacatttattgaaatggactaaaacgaaatagatgtttttaacataacacggacccacacccttggcccaataaaggataccgtgtccaccaaacagtccatagcgtaaataactgccgccattaccagtaacacggctggacttggaccccacgacacaggaagtatttttgaaacgctatctggaaaaataacctcactttgcaagtgtccggtaatcaaaaagaacacccgggtgtctataaaaagagtataatacgccgtaatacaaaatagcattgttcgagtcacaacaataattccaagcagcagttgctgggatgtagataagggtagcaggtctgatcgtatatttctgtagacacacaataacataataataagtcgaaagtgatgtagaatcgtcagaagtaacccggctgtgaataagagcatacagcgtgtcgctttatagtaaaaaaaaaagaagatacaacatattggttgaatcaacaccgtggatataatataaaacacggagtgttgcgtaaacgccgacctgtttacggtagatgtgcgggtacatgcagagcttaatagtaagtccgtatcacccccatacgataacataaccatggtgttataaagcggtgaattatcactggatttacacacttttgcgtcctcttcggggtgctggttaaccataacgctaagcaagtcctttgtctgttccgagacgcgggcttggggtgggttcataacgttcagtcgcagtttatagtccaaagtaaaaatgttgacaaagttaaagccgatccttgtattatgtagaatataccccgcctgacagactgttataacaccctctctaaatgtttacgtatgtttggagcatgtcacatagctgacgtgctaaacggtaggaggtgtggttgattggattgattggatcttttcatatgacgttaatgataccacggtgttttgaatgtttgcgtgtagttatatatttctcatattcggtgtggacctaaggttggcgatcacacgatcacgggacggcaagttcgaggttaatgttccgataaacgctttaatatggaatttccatatcattcaaccgtatcttataacggcgtaacgttttattttaacgagcgtgctaccagggcgtattttatatgcgggggatgcttaatttccataccccgcaaacatggaggcgagatcgcaaaatttggacatgttgttcgcggggtcggacccggtgacagatctgttgccagttacgttcgaagtgagctcaatcgcaccgggaagacatgggcggtatcatccaataataactgcgtgtttttggatcgagtggccttacttgcagcgggatcgggggcggtggatcgcgacctttgcggaacatttgatgttgaagtggaggaccctacgctcgcagattatctcgtgtccctccccgtgacgcatttaacattggtggcgggggtagatgttacgcgcgagaataagctaaaattgtttccaacacccaccgccattaataccacaaatggctttatgtacgtaccaaacgaagccagtttttcattggtgtatatgcgtatgttggagttaccagaaagtttgcaggagctagtgagtggattattcgacgggacgcccgagatacgagacgcgcttaacggaagtaacgacgatgaaaaaacaagtataattgttagtcggcgcgctgctgatgtggttacggaagacgtaaaagcagatgatgtgccgatttcgggtgaaccgtattctgagaaacagcctagacggcgtaagaagtccgatcatattacactaagtaactttgtacagattaggaccatcccccgggtaatggacatttgggatcctcgccataaagccactactcattgtatccgcgcgttatcatgtgcggttttttttgcggacgaggttatatttaaagccagaaaatggcctggacttgaagatgaacttaatgaagcccgtgagacgatatatactgcagttgttgcggtatatggcgaacggggggaacttccatttttcgggcatgcttacggacgtgatctgacgtcctgtcaacggttcgtgattgttcaatatatactgtctcggtgggaagcgtttaattgttatgccgttattgaagatttaacgcgtagttatgttaacgcgttacccagtgatgatgacacggatcaagttgctcaagatttaatacggaccattgtggatacagcaaacagcctcttgagggaagtgggctttattggcacgttggctgaaactttgttgttcttaccactcccccagcttccctgttacaaggaaacgtcacatcttgcaaaaaaggaaggtgtgcgaattttacgccttgcaaaaacaggagttggtttatcggatactgttccggttgatgtttctgtcacggaaaggcatgagtatgagatatcccggtacttagataccctgtactctggagacccctgctataacggcgctgtgcgtctatgccgtttattgggatcatcaattcccattgccctgtactacaatacaatatcgggtaatgcctttgaaccgtattttgctgggaggcgttatatagcatatttaggcgctctattttttggtagagtgcaccaaacaccatttggggacgggaaaaaaacccaaaggtagtgtgtattattcgcgaataaagtattgtagagaatacgtttatagtgactttttattatacatgttttttatgtcagaggtattttattatattctcgaaggcgggaatttccacataacatccatccgataataccaaaccccactaccgccagaaacgcccctcctaaagaggccccaaggtattgtcccgacattcgtatggcttgtcgtcgttcgaatcctagaagcgttaccacagttccgtttggaaacaacaacacagccttagagtcatccccgtgcatgtctggattgaagggtggaattgtggagtttcccatagcggctagttgtcgttctgtatctttgctgtcaataataattatatccataatcgcccccgtggttagatacctaagaaaaacacttccgcaatacaaacattcttttaaattgtccggatggggcagtgcgaccgtctctatgacaccatgttcagacacgcaagtatccctgcttaaataaacaacggatatggggttatatacatccacatctgccagggaatataccaaacccctttgaggtttgtttcgtgtaatcacataactgtgtccctggacagctggaagaatgagcacatattctccgttacgcgcggctgcatcttgacacgtaaatacttctggtacatgggtgtggagtatatgcaaatctttggcagtccatgtggtaaaaatcatcatggttttaaatgccgcgtcgaatatttcagattcgtctagttgggtatgcaatacctcgttaagtcctgggcgtgttggtattgccgacaggagattcataacatgaatctcttccgtgaggtctgtacgaagggaacccatacaaggactgtatacgtttggtattgtaaacatgtgttttgaaggatttaagtatgccaggccttcttgtatgttaagtgctgcttgcgtggcgtgagctgccgtacacatggatgtcattaaaagcaaagttgtgcgaccgtctaatacccgagatgaattttctagtccttcgcggaaatttaataaaatcattgaggcaaaaaataaagcctgcctctctgtagcatttaaattttgcttcacaagcagccccttgtatatgctcattataacacgcctggcgagagaaagtgcattcacatggtcttgaccacgggaaagcgcgtatgcggtctttagttgatcacgggcttcatcatatgaaataaaataatcgacatttgcgggttttacctgaccaaaaagaagtgaaagttcgtcatgaagctgcgatggatcggcaaagatcagatccgaggttccggatatagtgttgggatgagctcctgctcctatccgcattaaaatgtaattaaggaattttaattgatactgaacatctacgatctcatctaacagaaaatattctgtggtacggcccatttccgacaacgcaaaaattgatgtggctattcttgcggcgatatggtaatagctttcctcgtttatgtcatgttgatccgccttcgttgtcatccgcagagcctccgtgtgggccatggataaatgatagcggtaatccaaactctcttcgggatatgcgcatatatcgaccgtagcatgctttgaaaaattcatatccaacccacgtccaagtaaataaactcgataagatggccccggatccggacccggtggatttagctggaaccatgtggtgtcgcttgtaaccgcgttcagttttactgtatgtggtacaacaattaattctatcggtggtccagaggataaagaaatgagcgagctcataaatcctacaccaatatttacttccacacgacccgagtcgcttgtgagaagcaccgaaccggtggcccagtatcgaattggccataccgacccaaaaaggggaacgtgtattctcaacgttgagttggtgataattgcttcggcagaaaaaaaagtatgtcgggcaagggcatcccatgtagcaaaatgcgctttatgttccagaatagtattcttggggactgttgggcgagcgggtaaaagacttaccccaaacggcctttctgcagttgctgcggtctcagctctttccaaatgccatacaagggggtttggtgggaacgtagtaaacgcaacaagatgttgcgtagttaaatacggcgcaaacgaactgtcaaagaagctcacgtcgggtgtcacagggtgactaagaaatccaaaacgtccagcaggaaacggtgctcgatgttctgctttgaaatggtatggcgataacaagtattttggaaatataaccagcccgacgtctccttcgtgtgttgtagggttaaccttaacaataaccaagaaaacgtgttttctatcatttccccagtgaagtgatttaatgagttcttcatcgaaaccagtaggataaaaggcttctaatttcagagacatattacggtcggaatattctcgtagaagagcagacatatgtccgatagagcgagtcgcaggggttggtgttacgtaagatttattagccgtggtccaaagaggaagaattaccaccgctaaaactagcgcaaacatagtcgctgttacttgcgctacaatatcaccgcaacgttatgcacacagcgtgcctttacccctcctcacccaccaacaggcttggcggcttttaatattaccactccgttttagggagataaaggcgggattaaaggatgtggtaataaatgacgcatatataaaaaagaaaaacacgtacacgcgagtatgacaatgtgtatcatctttttactggtacatacgtaaatactaggtatatttaggaagtgttgtcctgaacggcattaacaagctctttcaatatattccatgcaccggaggacatgtttgccggggtcatctggggtagcagagtttttagttcttgtgccgcatgctggggtgtctgttctaacgataatacgaacggagacatgcttcgtgagcagtttgaaagggtctccattccccatgcccataacggcagaatatttccaaactctccgcaaagctccggaagtttaagcacggcgaataacgtgtcttcaatcccaggtacttcgcgtagttttatacactcggatttttgtaatttctgtttaaatacatcattacaaaatgacagtgtgttccagcccgcgtgccagttgttagttttaagaaatataattgtattaataagcattatatatacatttctcagaaccataacaaacggcagattaaccgtttctcccggtctggcccgtttgcttactctggataaatgactggggagtgaaacggtacaaactaccaagttggtcccggggggttcagcgggaagcgtaaacaataacccaggaagcgccgctggggacatatctcccactaagtatctggacaagggaaaacatatagttgaggcgattgggtgtcggtcggataacataattttatacggctccttatttacttgtacgagatccgatgtacttgtgtccatcaatgccgagattttcgcatgcataattgcatgcggagaacagaacaggctctgaaaatgagccgtgaggcgttgtgcgtcttcaggcgaaacgtctccattaagacggcgagtttgtgttccgtaaattccgcaaatggcgtcctcccctgcaaggttacgccaatacgacaggggctccccaatgagtaagatccggtttggtgttattgcaaagtggtgtaaaaattcttcggcggcggttgtttttccaattccatacgccccgtccaaataaatacgcaaaacgcccatttttacatcggttttatccgttgacatgtttattgtagacaaacgcgtcttaggttatcttctgggacggaacttcaaatatgtccgctagtcgaattcgggccaagtgttttcgtttgggacaacgttgccacactcgtttttacgatgtactcaaaaaggatattgataacgtacgtcgaggtttcgcggacgcgttcaacccgaggctggcaaaactcctgtcgccgttatcccacgtggatgttcaaagggctgtacgcatatcaatgtcgtttgaagtaaatttgggacgccgacgccccgattgtgtttgtattatacaaacggaatccagtggtgccggaaagaccgtttgttttatagtggaattaaaatcttgccgttttagcgctaatatacatacccctactaagtatcaccagttttgcgagggtatgcgccagctgagggataccatggctttaataaaggaaaccacacccacgggatctgatgaaataatggtgacccccctccttgtgtttgtatctcaacggggtctgaacctgttacaggtaactcggttacccccaaaggtgattcatggaaaccttgttatgctagcgtcgcatttggagaatgtagcggaatatacccccccgataaggtccgttagagagcgaagacgtctatgcaaaaagaaaattcacgtatgttctcttgcgaaaaagcgtgcgaaatcatgccatcgttccgctttaacaaagtttgaagaaaatgcagcttgtggggtggatttaccccttagaaggccttctttaggtgcttgtggtggaattttacaaagtataaccgggatgttttcccatgggtaagaaaacagcttttaaagcagtaccggtttatattcacgccagttgactttgtttgctgcagacaccatgacggcgagatatgggttcggatctatctcgtttccgaataaatgtgggatatttttgtctaccactaagaactttatagcccccaacttccccatacactactggacggctcccgcgtttgagttaagagggcgtatgaatcccgatttggaaaaaaatacgttaacgttaaaaaatgcggcggccgttgccgcattagacaaccttcgcggggaaacgattacgttaccaacggaaatagatcgtcgtttaaagcccctcgaagaacaactaacgcgcatggccaaggttttggattccctggagacggctgctgccgaggcggaagaagcagatgcacaatctgaggaatgtacacgtacagaaataatacgcaatgagtctatacaccccgaggtacagattgccaaaaatgatgcaccgttgcagtacgatacaaactttcaagtggattttatcaccctggtgtacttgggaagggcaaggggcaataactctccagggattgttttcgggccatggtatcgtactctgcaggaacggcttgtgttagataggcccgtagctgcacgcggagttgattgtaaagacgggcgcatttcccgtacgtttatgaacacaacggtaacatgtctacagtccgccgggagaatgtatgttggagatagagcgtactccgcgttcgagtgtgcggtattatgtttatatttaatgtataggacatctaatagtgtccacgaacctcaagtttcgtccttcgggaaccttatagagcacctaccggaatatactgagacatttgtgaattatatgacaacacacgaaaataaaaacagttatcaattttgctatgatcgtctaccacgcgaccagtttcatgctcgtggggggcggtatgatcaaggcgccttaacgtcacattctgttatggatgcgcttatacggttgcaggtcctaccgcctgcacctggacagtttaatcctggggttaatgacattattgatcgcaatcataccgcatatgtggacaagattcaacaggcggccgcggcgtatttagaacgggcccaaaacgtgtttcttatggaagaccaaactctattaaggttaacaattgacacgattacggcgttattattattaaggcgcttattatggaacgggaacgtatacggagataaactaaaaaataattttcaactgggtttgattgtgtcagaagcaacaggaacccctaccaacaatgtaatcttgcgcggagcgacggggtttgatgggaagtttaaaagcggtaataataactttcaatttttatgtgaacgatatatagcaccactgtatacgttaaatcggaccacagagctgactgaaatgtttcctggattagttgctctttgtttagacgcgcatacccagcttagtcgtggaagtttaggaagaaccgtaatagatatttcttctggacagtaccaagatcggctcataagcttaattgcattggaattagaacaccgccgacaaaatgttacatccctacccatagccgccgtggtatcaatacatgacagtgttatgttgcaatatgaacggggacttggaatgttaatgcaccaaccgcgtgtaagggcggcattggaagaaagtcgccgccttgcgcagttcaacgttaacagtgactatgatcttctatattttgtctgtttgggtgtcattcctcagtttgcctccacaccgtgagtattcactatccggtccgtggggtgtttataatggctgctgaagctgacgaagagaactgtgaagcgttatacgtggctgggtatttagccttatattcaaaggacgaaggggaattaaatattaccccagagattgtgcggtccgctttgccgcctactagtaaaataccaataaacatcgatcatcgaaaagactgtgtcgtgggtgaagtaatcgcaatcattgaggacatacgcggacctttttttttgggtatcgttagatgccctcaactacatgcggtgctgtttgaagcggcccattcgaatttttttggaaatagagattctgtattatctccgctagaacgtgcgttatacttggtcacaaattacttaccctccgtatccctgtcttcaaaacgattgtccccgaatgagataccagacggtaatttttttacccatgttgcgttatgtgttgttggaagacgcgttggaacagtggtcaattatgactgtaccccggaatcttcaattgaaccattccgggttttatcgatggaaagtaaagcgcggttattgtcgctggttaaagactacgcgggtttaaataaagtatggaaggttagcgaagataaactcgccaaggtgttattatccacagccgtgaacaatatgcttttaagagatagatgggacgtggttgcaaaacgtagacgcgaagccggaattatgggtcacgtttatcttcaggctagcaccggatatggacttgctcggataaccaacgttaatggggtggagtctaaattacccaacgcgggtgttataaacgccacattccaccccggcgggcccatatacgatctcgcgttgggtgttggggaatcaaatgaagattgtgaaaagactgttccgcatttaaaggttacgcagttgtgtaggaacgacagcgatatggcttctgtagcaggtaacgctagtaatatctcaccacagcccccgtcgggcgttccaaccggaggggaatttgtactgatacctaccgcgtattattcacagctgttaaccgggcagactaaaaatccgcaggtatcaattggagctccaaataacggacagtatatcgtcgggccatatggatctccacacccgcctgccttcccacctaatacagggggttatggttgccctccgggacacttcgggggaccgtacgggtttccgggatatccaccacccaatcgtttggaaatgcaaatgtccgcatttatgaacgcattggccgccgaacggggtattgacttgcagaccccgtgtgtaaattttccagacaaaaccgatgtccgtcgtccaggaaaacgggatttcaagagcatggatcaaagggaattggattctttttatagtggggagtctcaaatggacggagagtttccctcaaatatatattttcccggtgaaccaacgtatataacgcatcggagacgtcgagtttctccatcatattggcagaggagacacagagtttctaatggtcagcacgaagagcttgctggggttgtggcaaaactgcaacaggaggttacagagctaaaatcacaaaatgggacacaaatgcctttgtcgcaccatacaaatataccagaggggacacgggatcctcgaatatcgattttattaaaacagcttcaaagcgtttcgggtctatgctcatcccaaaatacaacaagcaccccacatacagatacagttggacaagatgtaaatgcagtggaggcgagttccaaggcccctttaatacaggggtccacggcagacgacgccgatatgtttgcaaatcagatgatggtggggcggtgttaaccaacaaataaaagtattacattcataaaaggcgtgtttggtttttttttttttgttaagcggtgtcgtgttaaacaaacagaaggcgtttttatgggtggtaaggttttatttaagttaaatttaatcggtgtcagaatcttcatcccctgatgatggttgttctcggtctggaataatatatggcgccatccatttttcctctggggtatccggaaacacacgcgggatgcaaacccatcgacccgttataatctccagtgccagtgaaatatgacggccccctggacatgtgtttaagtagtcgtattggctgtcgcggttaaggcgaaaaggtttcgttgcacatgctcgacaggttagctgtcccacagaacatacgtctcggggtgtaccgtcgcggggtaattgtaccggcgtgtgttctaacctatcttcataaatcgcggggggagaatcttttactgtttcattgagacttgaagcgcactgtttggacggatgatgtgcgatagacgacggttgttgtagcgcgttaatgttagacgattccataataaccccgttaagatatcgggtgcggtagaggtacaaaacgcgttttgtatattatcgggtataaataccccctgtgatgcgtaatggagacacatgagtaacgtaatacacatttttattaataaattaaaacaaaccccctggctatttacacccccgttacattctcggtgcgaacacgggagtatcctcggcgatttcgtaaagcaaggccggtaagacgtgaagttaaaagggcgctagtcttattttttttgcgggctttagattcttggcgctcagccgcagatactaacgtcatatatttaatcatttcctgggcttctcgaaatttatcgggatcaaacccgctatttaccgacggttcagtgttttgtgagtcgccaatttcttctattggggtatcagtagcgttgggtttctcggcaaagggatccattccttccggtaactgttttaaccccttggttgtgagtggatataatgccttcatcgggcttgttttaagtttaagcacgtaccggtacgcaaaaaaggccgctaccagtcccgccaaaaccaataatcccacggccaatgccccaaatgggttagataaaaacgtggtaaatccgtgtacggtggaaagcagcgctcccgtggccccaagaaccacatgtccaacggcctggcccgcggtcccaagtccctggaaaaactgagccatgccctgcataatggccgttccgctatcatattgcacaaccttgtctatgtcataaaaacgcagcgaatgcatttgatttcggcgttgaatttcactgtagtctagtaatcctgtatcccgcagctcgtctcttgtatatacttgcagcggcataaactctctatctttaagaagtgttaagtttaaatctacgtaagtgctaatcattcccacatcatggactgcgatttcacggacgtaacgataatcctcataatatacgtagtgatgcccaaatagaaaatatcgcttgtgattagccacgcatggttctaacagatctctggacataattaactcgttatctgttccaagctggccctccaccgtcccggacccatttaaactaactattgaaattaaaggacggctataacaacgcgtagtactaccagataccctcatagagttttgaagtataatgcgtgtatctgatcccagttctggacaattagaaacggagataacgtcgccgagaatacgagctttaacacgttgatccaaaatggtgctcgctaaagcacttgggttaattggaaatagtccgctccaaagggcgcgttcgcgattttgtagctggcaccacgacgaggagatacgtgccaacatttcattaacatgctcttgaatgtggtcatatgtaaactggagcatagcaaattccaccgatgaggtggttgttattgttctattggcacgcaactcaactggcacgcttcgtcgggatctggtatttcgagtcgggtgtttttgtggtgaatgattagtgttttcacggaccaattcttggagatagagacgggcgagggaattgctcagcaggggttgaaacaccacaacaaacccccctctggcaaggtaggtctggatatccccggttctaacatgagatgagttgtatctggttgtatagatccggttaataatagcccgggcttcctcctttacacattgactgagatggatttggttaagattaaactcgtttgtttcacttataaacgtggtagaaagtgttttcattgtaaagcgaaaattgtgtgcatactcatcgcgaactacgtcttcaacctcacgccacttgacaagcgaacaaacttccgttcgttttggcttccagttccaaccaaccgttaaatgaggcgtgactaaaaagttccgcgctgcaggttccagtaatgctctagtgtcaagatccctttgtctataaccctcaaactggtgaaaacgatccattgcataattggaatgttctctgtatgcaccatcccgtaggccaaaaaacggggacatgtatattatatctcccgtggaaagtccaaaactatcataagggaatattgatctggcttcaacttcctcaatgatgcaattcaccgacgtgcccgtcctatatgttccgggggttccggcaaccatgtacgtgtcattggtagtatgccatgctttggatcccacagaattatattttgatgcgattagaggcatatcctgtggatttttatcctcattaaaggcttcaactttgtggttatttcgtacgtacgttgctttagaagaacacttgccaaacttatcaatggtgtccgtgatctctgaaacgggaattggtaccctatccgcatatctattagtaatttgcgtataagaacttccggcccacgccgtgctaacgataacatctttgtaatataccgtcgccttaaacttgtacgctgcaatgttttctttataaacaacagcaataccctctgtaaagtttttaccaaggtgataatccggacatgtccgagttggttctaatcgtacgattgtggagcctgttggcggtgggcagacgtaaaacgtgggttttgtttcggcgtcctgggacttgtgtatagcttctctgatttcatcaccatcgcccagatgagcagaccgggttatatcttctgattgtgtgggctctacttgtaaactctcataaaacgagcttggagagaccgacacaaccgccgtaacaaacatagaaaatatgcataaaaagcataaccacacccccgtaacggaggttatgaaaacgccgggtccgttgaatccggagccagccgctgcattagggtgtatagaagagaaaaaacgtctgaatcgtagattacgacggtattctggtcgatccctgtttctccactttgaataatagccacaaggggacatgtttcttcgtacgttaaataaatgccgtctaagggtccgtgggaactgcctatacctttaggttgagacgtgcacccgcgtggatccttacctagacggtcaacgcgacataaccgcacctccccacaatggaaaacagaggtgaatagtgtggttgcaaacacaagctccctaatatatttccaggcaagtctctgtgcaaaagtaacgccttctaccccagaaaagcaataaaagcccctaaatggactgagaagccagttggaaccaacgacaccgcccataaactttgccaattcctcttttaagtgcggaaataggccaacgttttccacggtaaaaaataaggcggtgttagggggttgtgcaaaacggtgttcatcgtgattaaacaatgggccgttgaccaactcaaaaaatttatgtgtaagtgcaggtaacatagccgcatctactgtatgtcgaactaaggtattccttataaatctatgtgcatcaaaggccgcttcctgaatgcgattgtcgataatacaccctgcctgggaaaccttagctaaaaacacgtttcgtgccccaaacccattttgcatcgaaacaaatgtctgcaataaggcctctccataaacgtttaccctgagtgttttttctagctcttggcgctgttcgcggatacatctaccgaggctggttagagagcgcttagacagatgttcaagatatactcgttttctttccgcagcgtcaatttttgctttggataacaggttttcccatccatgaacagcaaaagttatgctactatcatcgttcagatcacattcggatgctgtagcgctgtcactcgcctctttggttaaatcatcctcacacccaactctttctaaaagttggcgtaaggcggcttcgttatcatgactcgggttagaaatgtgacgcatgagaggcgacgatagatgatgggcataacaggctttaattaatgcttctatctgactgtctggtgaggatgagcgattgccaaccaaaatactatcaattgcatccagagatccgagttcttcagaaaacgccctatcaaagtgtatgggagtttttccaaataacgccaactcaaccgttacggctgtaagttctgcgtgtttttcatgttcgtttaatacatccaaattatcaacaaacacgtctaaagtacgttggggtccttcagtggaattagacgttaaccagaatttaagctcgctgatggcgtacatacaccgaggggcaggtttaaaaacattataagaatcaagcatggtgctcgcaatttcgtatgtttggtcaaacgtatcgttctttgctcccatgggattgactaccgtcttggtttgaagtgttcgtaacgcttcaacggcggattgacgtttgatatccggtacatcagggatatatggtaaacaccgaataatatcgtcaacatccacgttaacccgaacttgcttagtaacgtgatcgcagatacatcctaataatctacgatgtaaggtctcaccttggttagctgttatacataattcttcaaaacatatagcacatggatgcgccggatcaaacaactccacgggtggtattagaccgcttcctatagtatctgtcataaaccgcgtcacggtttccaatgtgtttagcgcctcacgagaagacgtgataatatagcagtaattaagctgttttaaaaaattctcaatgtcgtgtaaaaactgaatttcactcgatacgtaacctccgtatgttgttaacgacagctcatggtgatattggcaggtttttaagttaaacgctgagacaaagtaatctttgatacagtttgagtctttagtctcaccataaacaaaacgcgttttaaaatgttgtagcaactcaaacaaacgctcaccttctccctttacataacataatgcccaatgcagtgcacaaaccgtgggagtgtttccaaattttagctgggtattaaatccccggagaaacagctttaataaataacgaactgtcaaacagttagccgctaaccgatataaaaagcgacacgccacccttggatcacatcgacgtagcagttcaacctgaaagatgtacgtataaacttgacccagtagaaccaacaatgttcgattaatatccaattccatgttatcgggctgttactgtccactggactgtaagctgaatggttggagacacactatattacaggtcatatgggtaaggactacacacaaaaaaagaaaacacaacagaatatgtaatattgacttgtttattacgtacactcacccgcgtgtgggctttaattggataaagagggaggttaaatcatttccattgtaatgttcccatgttttatgggaataccactaagatcaaagagttcgtcatcttcggggggtcgtttaagaccagggacagttgaccctgaaatgtttgaccctgaaatgtttaatacgttagatgtggtgtcatggcttggttcacaagaatcaaaattaaatgctaggtttgtgggggtttccccatctcccgctgtcgttttttcatctagaatctttactgcttctagagcgccttctacggtccagggcgtttccagggtttggataatctggtcgtgtaactcctccaagtctctggctaaaaactcatcgtctgtaagacttaaccagtcgtcaaatgccatatgttgtgctcgagcgcccactgcacgcacaaccgtggcgtatatggctaattgaaccatggccccgccactgacaattataccgcgaacttggtcggatagggtggtttctcgatttcccgacgagggacctgttacggggcagataaaacctcctctaggacatgctattataaaacggcgagtgcgatcaaatgtaaatagcgggcatacatttttacccccgtttaaaccgctccaattccctgcctgaaagacgcggttgtttcctgccgctccgtgatatttactaatgcttattcctaaaacgaccatgggacgttgattcatggccgcgcggactaaatgagttgaagtaaaagccgtagtccataattccggtaagttttccgttttttcaagaagcgcctttgcttgggtttctatgtccgcggcggacgtgacatctttacgaatccaatgcaaaacggatgatgggtcacgcgggcgcctggcacccgtaattatagaagttaaggtatttataaggtactgtgaatgatcgcagtatttaagaataagatttgccatataaaactgggctaattctcctatgcaggttgggggtagattaataaagtttattgctgcatattcctcggtaaaccgtttaacagctgcaatagtggtaatctcttcgtgtgtaagtttatctgccggcatctggttgcgttgtaacagggtccaaaaccactgcgggttgggggatttactgtttggtggcataccccgaggaaataacaggccgtgaaactgtttaagcaaaaaccctagggccccgtgtaacatatccactcttttttcttggcgttggtacgcacttgcaaggcctacaagccttgcccgggctgcctcagagagatttgtacagttacctgaaaaaacgaccctatttttaactcgtatatcccgaataacttccacgcttacgcgcgctaaatccccatcaaaggtacgccccgcgggcgcgtcttgtcccaatgtcggatttggggcggatacaggaccttcagataatgttacggttatagagcgtgttgatataaaccccccattaaacaggtcaacaaaacgccgccgcaaaacaggttggaattggttacgaaagttccgcccctcaacttgctgtccgtaaaatacacaatgacattggcttaatgctaagtcttgtaccacggctaggtgtgttcgtttaactaaaaaattggtaatgggacaaaatgctcctgagtatggatcaaacgttaacgccattgaatgggtggcttcggataatccttcacggatcttataatcgcgggtctcaaccaacactttcataaattgtgttgttgtctgttctatacgcgcacgcagtgtgtctaatatgcgacgaaacgttggatgatccacaatgacagacgatagtccctcggaagaacatggggcaccgcgatccagtagtcgctcttgttctagatcgataaacaagcgttctagtgtagccctataagtgtcctgcatggttgcctttgctgcttccgtttgatccccgggttttcgaaggattaaatatggagcatagtttcctagaggatcgcagtcgctatattggctgttcattgttccaaacaccccaataggttgacgggtggcttgtccaaatcgcggcatgcgttgtctaagtcggtgtactgttgtgtgagcgcataccggccgcgtgtgtttttcacataaactacatggaatttcagagtcaaaggtccccgtaacatattttaacgcatccccgtgaccccctgtaaacgcaccagcgtcacagcgttctagataaaaaagcagtcgcgccaacaggggtgctccaaatccacaaatgagtgccaaataatccacgctaaactctgtgtttgatgaacccgtagactgactggatagaacgtggccatctcgatctgtttggggattcgcagctaaatgaggtccggcaaactggtaaaatcgattaaatgatggacccggtcccccatccttggcttcggtcatcccgctatcctccacctcagttagatacaacgcagaatttgggctgaaaaccatcgcaccaatgaccccggccacacgagcggtatatgaccccagagcgtttagccttggcaaagtgccctccatgcctataaacattggccattctttgatatctgttggagtttcttcgtaaattccagtgttgaatataacttctgcgtgcaaggctgtgtcagcggccataatagacgccaaccgtctttcaaacccccccgatgggctaggcttagacgtggagttgacatcgtttcgacgcgctccacgggcggtagtggttccacttgaagaggactgaaaatacgtgtacgtaatgtcaggggggagtactgccccctcgtgattttcatcaaaagcaaggtgggccgctcctcgggcgacggcagttacatttctgacgcgcaaggcaacggccatgggagcaataacacagtcatgtattaaatggcacaacccggtgttataaaagggtgttgggtatacaaaaccctctccgatagacctgtgatgagtgttgaatgggtcgggtaccagacggttaacatcgggcatgaaaagttgtaccggaaataacggtatacgtataacatccccatggttaatatgaacaatatcgagtcctccataatgcagaaacacgttgcacataaatacggcttccttaaacaatgccgtgaccaccaagtataatattgtattttctggctctaatccaaggcgggtgcatatctcagcgccggtcgtctcaacagcaccgtcaacaggaggcccttggcagcgtgaaaacccaaaccgttctcgagccgcgttacacgcgcgtgtgagatttggggccgcggagctgggtaaaacgtgtttgcctccgtgaaagacaaagacagatggatagaaatgactggtagtgagttttaaggtaataccagctccggcaagacccgtagtgcgtgctccagaaaccaccgccaggctggatgtaaaagttttttccacggtcaaattacgcatcaaaggtaataaagccaaatcagagtccgtgctacgagcggccaaaaatgaaatttcctccagatccaaatcttcaacccggcacgcataaacgtaacccaggggccccgtgggcactgtcacagtcttctgagtattttccattttggtgaagtactcgtaataatggggggttgttggcagggtcaaatgaccacccaaaacccagtctgtcgatacattaagaagagaggcttttaaacgggtattacatatgcggaaaccacaacaaatcacgtgattacactttatgtattagaagggcgtggggttgtgttactcagtaacactggctttttacaagattatcaatcgttaacataaaatggcgatcagaacggggttttgtaatccctttttaacccaagcatcagggattaaatataacccaagaaccgggcgcggtagtaacagagaatttcttcatagttacaaaactaccatgtcatcgtttcaatttttggcccctaaatgtttagatgaagatgtgcccatggaagaacgaaagggggttcacgtcggtacacttagtcgaccgcctaaagtttactgtaatggaaaagaagttccgattctggattttcgttgttccagcccctggcctagacgcgtgaatatttggggggaaatcgactttcgtggggataagtttgacccccgctttaacacattccatgtatatgatattgtcgaaacaacagaagccgcgtctaatggagatgtatcccggtttgcaactgcaacacgaccgcttggtaccgttattactttacttggcatgtcccgatgtggaaaaagggtggcagttcatgtatacggcatctgtcaatatttttatataaacaaagccgaggtggataccgcttgtggcatacgttccggtagcgagttatctgtattacttgccgagtgtttacgcagttctatgataacacaaaatgatgcaacgttaaatggagacaagaacgcttttcatggtacctcgtttaaaagcgcatctccagaaagctttcgcgttgaggttattgagcgcacagatgtttattactacgatacacagccatgtgcgttttacagggtgtattctccctcatctaaatttacaaattatctttgtgataactttcacccggagttgaaaaagtatgaaggtcgggtagacgctaccactcgttttctaatggataatcccggctttgttagttttggttggtatcaactaaaacctggagttgatggggaacgtgttcgagttcgaccggcaagtcgccaattaacgttaagcgacgttgaaattgactgcatgtcggataatctgcaggctataccaaacgatgactcatggcctgactacaagttgttatgtttcgatattgaatgtaaatcaggaggatctaatgagctggcgtttcccgatgcaacacatctggaggatcttgtaatccaaatttcttgtctattatattcaatccctcgacagtctttagaacacattttactgttttcccttggctcttgtgacttaccacaaaggtatgtacaagaaatgaaggacgcggggttaccggagccgactgtgctggagtttgatagtgaattcgagctattaattgcatttatgaccctcgtaaaacagtacgctcccgagtttgccacaggttataacattgttaattttgattgggcgtttattatggagaaacttaattctatatacagtctcaagcttgatggttatggcagtataaaccgtgggggtctgtttaagatatgggatgttggcaaatccggatttcagcgacgaagcaaggtaaagatcaacggtctcatatctctggatatgtatgcaattgcaactgaaaaattaaaactctcgagttataaattagattcggttgcacgtgaagctctaaatgagtccaagagagatttgccctacaaagacattccgggatattacgctagtggaccgaatacacgaggaattattggtgaatattgtatacaagactcggctcttgtggggaaactgttttttaaatatttaccacaccttgagttatccgcggttgcaaggctagctagaattactttaaccaaggctatttacgacggacagcaggttaggatttacacctgtttattaggactggcttcgtctcgaggatttattttacccgatgggggatacccagctacttttgaatataaggatgttattcccgatgtcggggatgttgaggaagagatggatgaagacgagagcgtttctcccactggtacgtcaagtgggcgaaatgtaggatataaaggagccagggtttttgaccctgatacgggattttatatcgatccggtggtcgtattggattttgcaagtttatatccaagtataattcaggcccataacttatgttttaccacgctaacgttaaattttgagacggttaaacgtttgaatccatccgattatgccacctttacagttggaggaaaacgtcttttttttgtgcgctctaacgttcgagaaagtctgctgggtgttcttttaaaagactggttggctatgcgcaaggctattagagcgcgcatacccggaagttcttcagatgaagcagtgttattagacaaacaacaagccgcgataaaagtagtttgtaattccgtgtacggttttactggagttgcgcagggatttctgccatgtttatacgtagcggccactgtcactacaattggccgtcaaatgttattaagtaccagagattatattcataataactgggccgcatttgaacgttttattacagcgtttccagacattgaaagtagcgttctctcccaaaaagcgtacgaggtaaaggttatatatggagatacggattctgtgtttatccgattcaagggtgttagtgttgaggggatagctaaaatcggcgagaaaatggcacatataatttcaacggctctgttttgtcctcctataaagttggagtgtgaaaaaacttttataaaacttttgcttataacaaagaaaaagtacattggggtaatttacggcggaaaggttttaatgaagggagtcgacttggttagaaaaaacaactgtcaatttattaacgattatgcccgcaaacttgtagaactgttgttatatgacgacaccgtctcgcgtgctgcggcggaggcgtcgtgtgtttccattgctgaatggaatagacgggccatgccgtctgggatggccgggtttggacgcataattgcagatgcacatcgccagattacatcacccaaattggatattaataagtttgttatgacggccgagcttagtcgtccaccatccgcctacataaaccgtcgcttggctcacttaacagtatattataaattagtaatgagacagggtcaaatcccaaacgttcgagaacgcatcccttatgttattgtggcccccacagacgaagtggaggctgatgcaaaaagtgtagctttgctacgtggagatcctttacagaataccgcaggtaaacggtgtggggaagcaaagcgtaagttaataatatctgacttagcggaagatcccattcacgtaacatcacacgggctgtctttaaacattgactattatttttctcatctcattgggacggcgagtgtaacttttaaggcgttatttggaaacgacactaaactcacagaacggcttttaaaacgttttattccagagacacgagttgttaacgttaaaatgctaaaccgcttgcaggcggcaggctttgtttgtatacacgccccgtgctgggataataaaatgaacactgaagctgaaatcaccgaggaggaacaaagtcatcaaataatgcgtagagtcttttgtattccaaaagcaattctccatcaaagttaaggtcacacattttacagtaaacgtccgatgttccaatggatggcaccacagtctctgtttgttgttctgggttgcgacataccgacagtaaaaatgttgtctgccaaacgtgtgcgactattttatacccccgacacgcggcctgtatatgatcgattagtctgtaatggaggtgaacagatttccccggaaatataacatacatcataaaccctccggcatctccatcacgataaaaaagtacgcgtatatctcgcatgcccccctccctcataatatgatacataaaaaataattccggttgtgccaatacgctcgacaataggggttcagcggacgctgcttgcatgttggctcggtctgatagcgccaaaatggatgcaagaaacacacgatattcgtatatgttgttaagctgctgaacatatgctagtatcagagccgcccgatcggttcgacatagacgcggttctccagatgcagtgcatgtcggacaataacctccgagacctaaatgataacccattccggataacgacaggcagttatccgccactgtctgacccaagttaaacggaagggtgacaggggtcgtcttaataattggcacgattaagcctctaacggtagctagttcttctgggggggaccttgcgatgtaattaaaataatggcggtacacagaccgctcctttgacataagttttcctcgaatggtttgacggcggcatggcgttctggagcgtacacgcatcgaaggcccgctccgagatacggatttatatcgcctagacatacttcgatagggtgtgttcgagggagaccagcgatattgcatgtcgtcgaagcataagtcctccatctcgtatgaatgcggcattggcggttggtttgcgtggaaaaatctggtaggctttaaatgcatacgccaatgtccacaggccagcacatacacgaccttcaaatctgttttgtgcagccagttgggctttatataactccaacacttccttatccgcggttgtaggatgggcaaataaaattttagggtttgtctgtaattccgagagagcgcataggagatcgcaaaataaatgtttatatacggcctcggaacctgctgcttttacaatggttatgaatcgaccctcatcattaaatggaaatttaagtttaatggggttatctaggctccatgcattgattacaggttcgatacagtcaaataaacttgtgttatttgctgagtatgctaatatatcccttttaaactgccgcaaagcgatccaatagtgccctatggttaataaacaacataacatgcattcggtattcgtgcgaccacggcactttgcgttttttaaggtagttaacaaaataggcccaaatgctacttcgggacaggcatcctcgctcgtaaatttggaaaattgttttggaacgtccctggagttttcaatccggttcgcctgccagtatgatttaacacatccaacgcgagtttctatagcacaatttgtacgctcgtctacattccaagtagcaaccccactcagtaataataaagccaagtctgcgtaaccccaagctgcttctacgtaagacgattttttaagtttgtctattaatatatcttcaaactctatatcctcttttaatgcacgttccgcgcaggtaatcatcccacttgtgcgatgttccgatgatgaacagtcaaccatccgcgcgcaatctttccaattagccaaggcggccgctaaaggttgagggcctccagtcagtccgtcctgattaaagtaaaatgacttacgcgtttcggtttcgtctaaacgagacgtgctgatcgatagtaatgcagccctaactaccgcctgtacaaaaaaggagtaattggaatatcttactttgttggccatttccttaccggggggcggtcgtatacctggtaaccctccatcggtacgaaaacatacatgcaaaaaaaaatgtctttgtatatctaacagggaaagcgtgcgcctggcaaaggacccaaccaaagtaacgttataacggcacaggtagtaacgatccataagatacacaaattcaaaggcagcgctaaaagtgacaactgcacagggcggggatgccagacttttcatacataacatggcgtagtccgcaacccattccggtgtcagtccaaatttacgtttatacaaatcaagcgttctgcagaccaaacaggctctgtctaacgccaaaacgtctccaatttcttctataaattcagtggtacttgaggtcatttcattatccacacctaccgccgaagaggcctcataagtgacgttgttttctattgcacggggaacatttattaagtgggaggcaaataacaattctgaaaataacaaatcgttttttagcagaagggctggattataagcgatgtacgaatcggaaaatgcgtcggaacaccatccggaattagaagatgtattttcggagaatacgggcgattcgaatccatccatgggttcttctgattctacccgatccatctctgggatgagggcccgcgatttaattacagacaccgatgttaatctattaaatatcgatgcactggagtcaaagtattttcctgctgatagcacctttactctttccgtttggtttgaaaatttaattcccccggaaatagaagcaattctacctacaactgacgctcaattaaattatatatcatttaccagtcgcctggcgtccgttttaaaacataaagaaagtaacgattcagaaaaatctgcttatgttgttccatgtgaacatagtgccagcgtgacccgtcgccgtgaacgctttgcgggagtcatggccaaatttctagatttgcatgaaatattgaaggatgcttaatacatggggaaaataaacgcattaataagtcgtcagggggtggatcactccaaactcctcctatatcccacgataaatggtctaaatacttcacgcgtgtgccttggtttgcaaccttagatcaatatgtcacggagaacgtatgtacggagtgaacgcaggaggggttgcggagataatcttttacaacgtattcggttggtggtaccaagcgctcttcaatgttgcgatggggatcttccaatatttgatccacaacgcccccccgcccgttgtgtttttcagtttaacggcgaagacaacgtatccgaagcctttccggtagagtatattatgcgtttaatggcgaattgggcgcaagtagattgtgacccttacataaaaattcaaaatacgggggtgtctgtgctatttcaaggttttttttttcgtccgactaacgcaccagtggctgaagtgtccattgacagtaataacgtgattcttagttcaacgttaagtaccggtatcaacctatctgctttggaatcaattaaacgaggtgggggtattgaccgccgacctctccaggctttaatgtgggtgaactgctttgtgcgaatgccatatgttcagttatcctttcgttttatgggaccggaagatccatctcgcaccattaaacttatggcccgcgccacggatgcatacatgtataaggaaactggcaataatttggatgaatatatacgctggcggccttcattcagatccccacccgagaacggaagtccaaacacgtctgttcaaatgcaaagtgacattaaacctgcgttacccgatacccaaactacgcgtgtctggaaacttgctctacccgtagctaacgtgacatatgccctgttcattgtaattgtactggtagttgtattaggggcggtgcttttctggaaataaattgcctttccgtacatatcctgcgcagatgtacgtgtatgctgttatcgattgtcccgtaaactaataaacgatgacacaacccgcatcgtctcgtgtagtctttgatcccagcaaccccaccacattttcggtggaagcaattgcggcttacacccccgttgctttaatacgacttttaaacgccagtggacctttgcaacctggtcaccgtgtggacatcgctgatgccagaagcatttacaccgtgggagccgcggccagtgccgcgcgtgcacgcgctaaccataatgcaaatacgatacgccgaacggccatgtttgccgagactgaccctatgacatggttaagaccaacggttggcttaaaacgtacgtttaacccgcgtattatacgaccacaacccccaaatccatccatgagtttgggaatctcggggcctactatattgccgcaaaaaacacagagcgccgatcagtctgctttacaacagcccgccgcgttggcgttttcgggatcatccccgcaacaccccccacctcaaacgacgtcggcatccgttggacaacagcaacacgtggtgtcggggtcttctggacaacaaccgcaacagggagcacagtcaagcactgtccagccaacaaccggatcaccgcccgcggcccaaggcgtgccacagtctaccccgcccccaacccaaaataccccccaggggggtaagggacagaccttgtcacacacgggacaatctggaaacgcttcaagaagtcgtagggtgtaaataaaaatacacagaaaataatcgttgttttttttttttctttaataggcgctactttatatatatgttccatctaataacaatttaacataccccaggccttgaaatatatcttccgtgtggtccattaaaagtttacgtgtatatctaacgttgtcgatcatacgccgacatgcctggcttaacagtgccagtgctcccaaggcggtccctcggacataacgtcgaccggtgactacatcggcattaacaacgcgtacgtgcctaggaacgcgacatgaccgatgttcgtcgagacttagtacgatagaattttcactctcactgctatagccgtcagaaggttcactaaaatcactttgatataggtctctgttcggtgagttaaacgggttagaagatacgccccatgtgtgtacgtcccgcggaaagtttggcgacggctgtcttgttttatagtttgtcaataggtccgtttggggggcatcggctgccgtgtcaacccaagaaggtaattggttatttacagggtggaatactgttttggagttatacattcgagggtcattttgatgccgtttttgtgtttgatttgatttttcaatccaagtccggtaagatatcgagtcatctgtcggaatggaggtaatctcaagtattggtttactgaacgcttggtttaacgtttggttttgctgtggattatttttccaatccgacaattggttatttggtggggtaatacttttacaaacggttgttttaatggaggtggttaattgcttaggtataagcacagccgtttctgattcggtttccacatacaagggaatatctttttggctaagggttgtttttacgctttggggtttcttaaaattttgtaccactatttgtgtgcccggttctatgggctgcgcgggctggacggtctgcgcgggctgcgcgggctgcgcgggctgcgcgggctgcgcgggccggacgggcatttttttacatttggaacttctaacaacttgaacgggagacttaaatagtggctccgttgggtaaaaatcagttgtgtcgaggtttggggggccttggggcgcataaccggcaataatttgcgagtaaaatggatcatcgggacacgaggggaaagagtcctcatcggagtcgatgtacggcaaatcaataagagattctggcccccaaaagaccacataatccggagctggaatcgagtcttttcgttcccataaaacataagagggattcatatgttcgtccaatagcagtaaacacgggggattgtttgtaagaggtttgtttgcaatgagcgcggacagtttttctagttggacaattaaacatgcattttcaattgggtgaggatccatatgcagtaaacgtaacccccaagaaacaatatcgggagatacggctgaggatatacccgaatctgtagccatatgccgggaatcgaataattttaaccccaaagtaagtccggaattttgtgaaaaaacggatgtaagttccatggcaataaccaaaggagccccaaataaaatagccgtagttgctatgtcaaacgctgttacattagaaacgtgagttggtgccgcccccgttactgtaaaaactgtcgttgccccggtttgaatataagcatctgtaattactttacggtctgtattccactctaacgtggtattgctgggagcggtatcaaatcttgcattaagcgtggatgacaaatccagtctcgcatcaactataatgtccacatcatcttgtgttctgtatgcgaattcctccggttgcagcgtattccacattgacactaaggaaattggcgggagacacatgcgcccaagtacagtaatggtcgcaagacgatctgttgccattatacgggtaactgcatcgacattggcctttaccccgggggggggggaaagttgccatggcgcaaaaggatccgttattttctgtggcattttaacaagtttccaatctgccatccgaaatgcaaatattctcccgccggtaggatcttggtttgatccaagagctaacgggagtttatgtttggatggggcggcattaaaaaaggcccgggcattgcctttcgggtctccatccaatgagcgaacgagtaaacgacctctaaatgcggcctcgattacgggtctgagggtacgggccatatactcatgctgtttaattaaatccaatctagcaaaattgagaagatgtaccggggttgtggcaaccaaaatagttacaatatcagatagggttaactctaatacgcgtacatcaccccttctctggattggtttagttagtccattgcccattacagaagttaggtggtgtttttcaaaagaataaataagcttgtcccaatgaaccccgtattgtcgtgtcaatgttgttgttataaggccggcgtatatctctgcaatggctctgcgtgcgttggttttaccccattcggcgtggcgatgcctaacaaaggtggaaaaggcagaaaacccggattttatagcggattcgtattcaatgcgtagctcattgacctcattggccacgcgtaatgccgatagtgtagtttcttccacaataccttcatcgggaagtgccggtcgtaaagataatccaccctgactgcatagcatggttccaagtttaaccccaactgatttataacacactctatatcgaagtggaaccccatcagtatccaagtaaaaggttaaattttttccaaacaaagcgtctatagaagatctggcttccctaaacgtttgcaccacagacgcctcccccataaacgcggccacccgcgcgcgaatgcatcgggattggtcttctagacatacacccgacatggcgggaataggagcaaatactccgtttggagacgcgggtggaaaaatctcagcataacttgcatacaagcctaaccgtaccatgagtaaatttcgaaatgtcatatactgtgtttttatccatataggcaaatgtgtaaattgatcgaaatcacgtaataacatacgaagaacgtcatggtcactctccgttggaatacgttcaattaaagctcgtaagcgagacgcggtctcttcaaactgtctttgtttttgcaacacaacatccaacgccgttttacgttcctgttgctttttttggagacggtttttcgtttccacaggcaataaaaaaaattcgggttcggaacaaagcatgtcaaccacagacgccgatgcctggagtgcctttatactatctacggaagtagcgtacgtgtcccccgatgccaacatatcccccgtttctcttttaaatgttgtccatgcatcgtcccacgtaacctcaccggtttctattcgtcgtcgtaggagatctaatttagttcgtaacgcataaagtttatccaccctatctttataagtatgcagggggccggtaccgtctatacgcacacttagtggatgggagtcaataatattgcgagcttggtacatccagtcaaccgcctgaatgtccaacgtaccagtttcttcttccagacgccctaacagcaatgcaaactgcgtgacaatgtcctgaacggaagtagatctatcaatggccaatgcaattgttttgggagggggggttagttttaataacgtcttcaggttagtgaaatccacgtcttcttgttgctcagtggcattggccgtatcaacaatgttttgtaaaatttgtattgcacggttctttgttgcctgacacaccatacgaaactgtgcaagctctgcgttggcctcctttagatcgcggtctaccattgtttgtaaaactctttcatatgccgttcctataaatcgtttatgatcgaaagttgtaaaatactctatagcccgaatcaataaaccttcgcttggtaatgtaatgaagacaccttctttaagtgcaagtttagccgtttcgtgtgcccgaacatgagttacttcctccaaagccttatttgcttctgtaagtttagccccggcagcctgtctgatgtctgctctaagttcacttaacgttacactttcggttataaactgatcataagaccgtgtgtaaaaatcaacatacccagccaatgcgggtatttgtaatagatcccccgaggttcgtaatatcatatctcggtagttaggtattccattaatagacgtatcggcggataataacacaaccgcgcgaatacgcataagcagaaggagtccctcaatactaacacctggaaacataacggtgaatacgggagccgtaatcgaaaaatcatcaaaccatgttaaccctcttaacaaagccaaaggtggtggaatatttgtattttcgggggtatatggattgtggcgaaacacagtatctaatgccgtaacggctgtagtttcacatgccgctacaacctgacgtgcttgtgggtaaactgcgtgtatatcaaaccctcccgcagcggccatatctcgcaaccgtgccagttctgtcccgttaaatatatggcgcgtttccattgcctccagacatgctataatatcacgtgtccaacgctcatacaaaacccgagtcgtttgttgtttatgtgcacgttcacaatcggtaattaacacttttgcctgttccttcttctcatgtgccattgtgacgagtttatgaagatcctttactactcgagataaggtagatgtcccagcaatacaatgggggggtagcttttgcagttcaacttcaacaagtttaaccgtatccattagggcgtgcacatttgtttgtattgataatatcgcatcgtttatttcataatcatctacatttgaagatgatataaacttcaagtgtccagatgagacagctagggtggagaagtcatctccaagttgtttttgtaattcagtcaacttatgggtattcgtaatttcttgttgtaaagcctgatattttttatataacgacaacacaaaggataaggctggcactgtagatgaaactaacgtcgctttactaagagttgcaacaacagcgtttatggcggactcactttccgggttagtagatacggtcgcgatgtcggatgcaagcacatctgccacgtcaccaaaaaacgcaagcaatgatggtctatactccgtaggtatcggcacaatttcgataatagctgtaaaacaagctcccagtcctcctaagacagatgtgcgtgcgtttccgggatgttctaaaatgtctcgatattggttaaataacgcccagaaatcacccgtaagttgagaacggatctctaccggcgcctctaagactttggtcctgagatttaccagggctccttggacatctaactcagaagcaagttccggtaataaatctactgcagccctaagtcccacaaaaccggttaccgggcgaagtaaccccccgagtttattatatgccgcctgttttcgactctttattgtgtcctgtgtggttcgggcctcgtttgcatacgtctgaacctctttaagccttgtttccaatcgtcttttaatcgaaggttgtaaaccggattggatcattggatcacttaaaatttttatctgtcgcaccaaatcgtctgtagcacgtacaattgttgctaataaatcatcccgtgttatttcaggatacttgacctcaccattgttatatgtttcatagtcctttacggcttggtctacggccgcgcttagcgtattaaagcaagacaactctgcttccgcggaagcccgttgcgttgcgcgtgtattaatggttttaattgtacgtgataattcatcgaactctcgtctggataagtaacctgcggtttgagcttccccgactacagataaccacgatacgagagccgtgtctgtgtttaaatcttccccttctttaataagctcttttaacagagatacgacggggagattttgtatagtctcaggaggagggtgtatagacagggacgatatgattgccgttaatttagcgtcgaattccggaagagaatctaaaagccgttgaatgggtgccgtacttgcggtcgcgacccgaaaacgcctaggggattgttcagcgatcaaggcccgtgtgctatataacactccgcgggtgaagtattctgtaacagccgaggtcaatagcattgtaacttcggatcgtatctcatatacacgccgaattaactcttcgggtggaatgtcggtttcttccgggggttcctggggaacttctggtatttgaatggcatcaattttattgcgggtagaccgtaatgcattctctaaagcctttacactagaaacaagcgcggtgtgttcacgcatatagcgtgtctcccgggccgagactaattcacaaagaagacgtattcgttcagacagggaccctgtacgggttggaataagctcggcaaaaagtccgggatgagaaataataggcgaatttagtatacttataagacctgtcgacagtctagaatagaggtctatgggcgacgaacctcctagatccgcttctaacacatctagttcggcatgtaaagcgccggttgtatcctgaacccgcatggcaactagaccaaacttagcgataatgagcatgccaattgtacattttttccggagaacagttttaatagcatattccgcccccggcatgtttgttaatatcaaacttgtaacgcgtataagttccgcggcggagggaaatcctgttaaaatttccccaaggggacctataaagtctgatacaacgcttgtagcaccatgatgtgtacgtgttccattttccaccacaaatcccgttaaacgcaaaatggtgaggttaataaaaagctccaatggatccttttcgtctggcataaccaagggccttgttacccaaatgggaacatttgtatgaccggtaataacagtatccaacgtacccaccgcattttgtacgtatccattgctaatttcatgcccatgttgtagtagtttttcgacaaccatgttgacatcaccactctgttcaaatagaaatggcttccgatctttcaaactgcttcctacattcatgttccgtgaaaaagtgggactggattcaggcgtatctacattggatacatttaacacaacgtctggggtgttagcaacttctcgtaggcggggtaatacatgtgccacttgtgttttatccggcacgtctacagttggtttaaatttgagaacctttttagcgggtttatgtaaattatccgtggaatgtgtattatttaccaagccatcgtcgatacaagctaaattttcctcgcttgaaggaggagtccatgaaggacggcgtctacgacgacaatccaaaacgccagacccagtcgaggttgtttctagaaccgcatgccaaggatcaacctcgctgtaactacatctagggtccagtgcaaccgtgttggttaacgttgaatgtagggttgcttccaaggatacactttcaccaacgttttggtgaagaggtactatagacgatttattaagcacaattgtcgtggaattaggaggtgaaagaagcaacggatgttgagctgtaaccagtttttcgcaatattgttcatctgtaaaatatgtatcacagcttccgtatataagcgttactgccgaagatagcgcttcttcgcttacgggaccgtcgtttgcggtgacaaaaaaaactaatgcagcggcccattgggattctacgttatcggggcggtgggtatactccgatgcgatataagagtacacatccgtggtattcacccgaacaactacagcctgtcctatagtcccatggccatgtggatcaaaaataaaagatatgtttccctgacgatagatggccattcccgttgagtctacagttataattgtatacgactcttcacgtcccatccacacatcatcgaaaaacgctctagcgggaatttgtgtgcacataaaaccctcgtctggaacggtaaaaaaatggctatcgccgtatattctagacaaaacgcagcacgtactggtagtgtcccccagtttaatatatgaaattcgattggggagatcaacaagagcacacatatctgggacacccctccccatattagacagatccgtagtccatgctgcaccctcttgtaaacatccatcaatcatgtctgatgacagggttgcattaattccatgcgcatatgtcatatgcaaaaacgataaagatgttcttaaacatgacagacctgacgccggtcccagggcaccgtcaaattgattacggcttcccactcccgcaacagtgacagctataggcggaattatatccattttattgcttacgaaaattacgcgctcaactggtagggacgctacgtttacgatgattcaaatcccaaagagcgttgaataagcacgtgtagctccaaaaacctaggaggttatgaaaatactagcaacaacagcgttatacaaacgaaacgcccagtcaataaaaaccacaaatactttaatgtacataaacacgcctgttttatattaagggtcactcccacttgtattcccgggtacgccaagacgcaaatctacattagataaaatctcatctggacgaagccatctttgtcctattatcagcgtcggagcctctgaaattacgtctctgaccgttgtcgttattttaacattatcatgtaaaaacgttgcatttacattctcccatgttcctatattacattgtgaagttaaaaccgcgcccatctgaggtccagaatccacaataaactgttgcctggagtccataacgaatgaaactgctgccttgtgatcttccagatttcgggcgtgactcatatatgaggttggggcatttacacgatcctcttgtatattttttaaaccgcgcctcaattcattacacacggttgcaatagattcggccgacgggactgccgtggcatgcctacaagctgttgctattcgttcccacctatttaaaaaaatctctacatttgcaagaccgggtatattttctcctgttgttagtttgtcaacacgcattaaaatgtccatttgatcctgtgtaaaccgtgcataccgggaagccatcgttgaaaaaagaggcccaatagcagaagtggaggttttagtcattaaattttcacattccctaagggctgaggaagcatcggccataattgtgcgcaggctggatattcccactctcatttgcgttcggattccttgtattgtcccaacaatatgaccaaccgcatcagcaagatcgtttaaacgccataccccaaattgttcatcgcgttcaacctttgggttacagataccaacagcctgaagatctggcgttggataaaaacgacacgcaaaaaatttttgtaacattaacatgtaccgagaaaccactaacgcgttggatgtaaaattttcaaccaacgcctgcgatgttttatccagtcgggtccaacgaccgtaaagttcatcataatagagagttgctaaaaaaacgctatttgtaatagaaggacggtcaggaaccaaaggacggacgtgctggggaagcaggtcaacggcaatgccaacagtccgatgaagttcgcatataagggaatctatagtagaaacgtgagatggtaaaagtactggggggtgtgtacgggtaaaaggttctaatattgttataagagcagatagttttgtgcgatatccatctgcattgggcacggttccggatccataatcgcgagcccactgaagaatagacaaggcttgctgtattccccgtgtatcaaaagacaaagctattgttgccgaaagggcatcaagcgtgcttgttgcaataatataaggcacaaacgacggttccacaaacacgctagagcgattatattcggtaggatatgcaatctttagtgcttctgttatcatgacagcttccaaccctgtagccggtggatcaacacaaataggaggtgtcatacccacatccaccgggggagtaataccccatcttgaatccatacgtaggtcaaaccaggttagtacggcttcgcgtacggcactttgtcctgcttgtggtaataacgcacctgaggattgattatgtgtttgcttaaaatatgttgtctctctagcttctgcatgtgaaatttcattaagtagtattacgcgtgtcgcttgtatactttcaataaggggtcgtggagcaaaacagcgccgcataatttgtcccaggcctcccggtggtaatcctaaggcgggtaatagcgtttcataccgtttttcggtctcgtttactgtccgtgtatatgttaacacatactcggtagtaggagcgtacgtttccactaattggtatgccagtccacccactaaagcgagacatcctagtgtttgttggaaatctgtaatatgctcgtctgctacaacgcttccgtgaataaaaccggcgagtgtgtggtgagcaataaaccgacgtagcaatttgcatgaaaatcttgtaaacccggattcggcaagggtgcttattaacatactaggcgatgtactagcctgaaccttttcccaaatgccacgggtgtgttctgctacattacttccagatgtggtttccgcttccgggtcggagtttagtaaatgtaacagcgcctcaatatgaattccgggggtggacaacgataagaggttgctttcccatataccattgtctaatctaagtctcctagcaagcattcccggggatgtctcaaaaacataagggtctcgataagccagagctgaggaaattcgtgactcgtgcaccgttcgtggattcgttaccgcttcttcgatggatacgaacgcctcatctttaattaaatttacagtatctgcaaataattctgatatgctatgtactggcgtttccgtgagatattcatcaatcatacagattataaaaagggctcgtgttagaggagtgagtgagctattttgaatctgattccacataacattaaacggaagaagccatcctgcatattgtgttaaaacacgaatcccctcttgaacaaatggcatatcgtaaatgatcgcaaatttatgttgtgttaaagctgcaatggcgctttccaacattccaatacgagcgtgagtgaatggtgattcaatggctgttgttgcatcctttaaggcgacctcgtacatatttatccagtccgttataatgaagtgtatcgaaacgggtccaaatttagacgaggttcgtaatttattggccgataaacgatgtaacgtctcggaatcttgtactacacttgatagctgggttaaaatttttaagctattacctggctcctctatcgtccagtctagatctagtctccaaaacaacagtccgggtaaattttcggccgtgaaagcagcctccgccaaaaatgtattggaatatacaaaacagatattagaatgcaggggttcccatatctgaataaaatgtttagctggaattttctgggtagatcgtaaaaacttaactaccttaactctggcgatttctgttttctctggtgaccatggtctttcgttgtccgcttcttgtactttcaagttacttaaatcatccaaaagtttttgtgtatcataacaaattggttcttccatggtatattctacgctgacttaactttataacgtgatatgaaaaagctacatccgtccggaatgaaaagacataaatgtaacatcaataaaaacgcatgttaataaaaaggacgtcacggtaagttgaagaaccttttaacgccaatcaaaatatttttataggctcctcctacctaacattatataaacggtactacgactgtataatgtgtacacataccccaggcaacatttcagatagtaccacgtcacgattgcattgtgtgaatttaacccctcagctatggggagtcaaccaaccaactcgcattttactttaaacgaacaaacgctatgtggaactaatatcagtcttttaggaaataaccgttttattcaaatagggaacgggcttcatatgacttatgctccgggcttcttcggaaattggagtcgcgatttaacaattggccctcgctttggaggtctgaacaaacaaccgatacatgtaccaccaaaacgtacagaaaccgcgtctattcaagtaaccccccgttcaattgttattaatcgtatgaacaacattcaaataaatccaacttcaattggtaacccgcaagttaccattagactcccgttaaataattttaaatcaacgacacagctaatccaacaagtgtcattaaccgatttttttcgtccggacattgagcatgctgggtcaatcgtcttaatccttcgtcatccatctgacatgattggagaagctaatacacttacacaggctggacgtgaccccgatgtactactagagggtttacgaaacctattcaatgcctgcacggctccttggaccgttggagaaggtggggggcttagagcatatgtaacgtcattaagtttcatcgccgcatgccgggcagaagaatatacggataaacaggcagcggatgccaacagaacagcaattgtttctgcctatggatgcagtcgtatggaaacgcggctcataaggttttcggagtgtttacgtgcgatggtacaatgtcatgtatttccacatcgatttataagtttttttgggtccctgctggaatataccattcaggataatttatgcaatataaccgccgtggccaaaggtccccaagaagctgcacgtacagacaaaacttcaactcgcagggtcacagccaacatcccggcctgcgtattttgggacgttgacaaagatttacatctttccgcggacggactgaagcatgtgttcttggtttttgtatatacacagcgacgccaacgagaaggtgtaagactgcatcttgcattaagccaactaaacgaacaatgttttggtcgtggtattggcttcctgttaggacgcatacgagctgaaaatgccgcctgggggactgaaggggttgcaaatacccaccagccatataacacaagggcgttgccgcttgtgcagttatccaatgacccgacaagccctcgatgtagtattggcgaaattacaggagtaaattggaacttggctagacagcgattgtatcaatggaccggcgattttcggggacttcccacacaattatcctgcatgtatgcggcatatacgttaattggaacaattccatcagagtctgtgcgttatacaagacgcatggaacggttcggaggttataacgtgccaactatttggttagagggggttgtgtgggggggtacaaatacatggaacgaatgttattattaaagcatgtatgtaaaataaactgaatttaacatagcgtgggttttgcgtgatattatatactggggaggggcaggctgtacgtaaccatatataagggagtctacaatattgtagaactaactcagctgtgagtttagggtttaaaggtttattccggagcctaaatacgttatccgttatggagttcaaaagaatttttaatacggttcatgacattataaaccgattatgtcaacatggctacaaggaatacatcattccgcccgaatcaaccacaccggtggaattaatggagtatattagcactatcgtctcaaaacttaaggcggtgacgcgacaagatgagcgagtgtaccgatgttgtggagaacttatccattgccgtattaacctacgatccgtttccatggaaacgtggttgacttccccaattctctgtttaactccccgagtccgccaagcaattgaagggcggagggacgaaattcgtcgggctatattagaaccgtttttgaaagatcaataccccgctttagctacccttggactacagtctgctttaaagtacgaagacttttatttaactaagttagaggaaggtaaattagagtcgctttgccaattctttttaagactggcggccaccgtgacaacagaaatcgtaaacctgcctaaaatcgcaactcttattcccggaataaatgatggttatacatggactgatgtctgtcgggtatttttcacagcgttggcatgtcagaaaattgtcccggctacaccggttatgatgtttttaggtcgagagaccggggcaacggccagttgttatttaatggacccggaatccatcactgttgggagagctgttcgagctatcacaggcgatgtgggaacggtattacaaagtcgaggtggagtgggaatttctctacagagtctgaatttaatacctacggaaaatcaaacgaaaggtcttcttgcagttttaaaacttttagattgcatggttatggcaattaacagtgattgtgaacgaccaactggagtttgtgtttacatagaaccatggcacgtcgatctacaaactgttttggccacacgtggaatgttggttcgtgatgaaatatttcgatgtgataacatattttgttgtttatggaccccagatttattttttgaaagatacctaagctatctaaaaggggctagtaatgttcagtggactctttttgataacagagccgatatccttcgaacattacacggggaggcattcacttcaacctatttacgtttagagagagaaggattaggcgtttcttctgttcccattcaagatatcgcattcacaatcatacgcagtgctgctgtaacaggaagcccctttttaatgttcaaagatgcctgtaatcgtaattatcatatgaatacccaaggaaatgctatcacggggtcaaatttgtgtacggaaattgttcaaaaggcagacgctcatcaacatggcgtatgtaatcttgccagcataaatcttacaacgtgcttatccaaaggcccagtgtcatttaatttaaacgaccttcaattgacagcaagaacgactgttatttttttaaacggggtcctggcggctgggaactttccatgtaaaaaatcatgtaaaggtgtaaaaaacaaccgatcacttggcattggcatacaagggttacatacaacttgtctccgcttaggatttgatttaacttcccaaccagctagacggttaaatgtacaaatagcggagttaatgttgtatgagacaatgaaaacaagcatggaaatgtgtaagattggcggcttagccccgtttaagggttttaccgaaagtaaatatgctaagggatggttacaccaagatgggttttctacgataagttatttagatttaccatggtgtaccctgcgagatgatatttgcgcttatgggttatacaactcgcagttcttagcgttaatgcccacagtttcatctgcacaggtaacggagtgcagtgagggtttctctccaatttataataatatgtttagtaaggtcaccacctcgggtgagttacttagacccaacttagaccttatggacgaactaagagatatgtattcatgtgaagaaaaacgactggaagttataaacatacttgagaaaaaccaatggtcagtaatacgttcgtttggctgtttatctaatagtcacccactcttaaaatataaaacagcgtttgaatatgagcaagaggatctcgttgatatgtgtgcagaaagggcgccatttattgaccaaagtcaatcaatgactttatttattgaggaacgcccagacgggacaattcccgcctccaaaataatgaatttgcttatacgtgcctataaagccggccttaaaacgggtatgtactactgtaaaattcgtaaagctacgaacagcggactgtttgcgggaggcgaattaacctgtaccagttgtgctttataaatttacacgggaaactattccaaaatggatcagaaagattgcagtcattttttttacaggccggagtgtccagatataaacaatttacgtgccctgagcatttcgaatcgttggttagaaagcgattttatcattgaagatgattatcaatacttggactgtttaacggaagatgaactaatattctacagatttatttttacatttttatcggcggcagatgatctggtaaatgttaatttgggctctctaacccaactcttttcccaaaaggatattcaccattactacattgaacaagagtgcatcgaggttgtccacgcgcgtgtctatagtcaaattcaactaatgttgttcagaggggatgaatcgttgcgggtacaatacgtaaatgtcactattaataatccgtcgatccaacaaaaagtacaatggttggaagaaaaggtacgggacaacccatccgttgcagaaaaatatatactaatgattcttatagagggcattttttttgtatcatcgttcgcggctattgcatatttacgcaataacggactatttgttgtaacttgtcaatttaacgaccttataagccgagatgaagccatacataccagcgcatcgtgttgtatatacaataactatgtacccgaaaaacccgctatcaccagaatacatcaactgttttcggaagccgttgaaatcgagtgtgcgtttttaaaatcccatgcacccaaaacccgtttggtgaacgtcgatgcaattacacaatacgtgaaattcagcgcggacaggcttttatcagcgattaatgtaccaaaactatttaacaccccacctcccgattcggactttccacttgcatttatgattgcagataaaaacacaaatttttttgagagacacagtacatcttatgcgggcacagtgataaacgatttataacatgtatatacgagcaaaataaaacaatgaaccattaagtcgctcttatgtgtgttttaattccaatattttgttaatacagtgtttagtgggagtggagtaggaataaactgtttaaaaatacgtgcgtattggcgagccattttttccccctttaagttatgatataaggtgttaataaccatatatgggtctgccgtattttgcataatatttacacgtttcattaactttaggcgaccgcgggtcaatggagttaccacggcgattatatgttcaacaaatgcgcgttccaaattatccaatggggaggatgagggtggcagaaggtttaaagcccaactggcgtctactgtcacctccgatcggttagatgcatatttggaaacggacactccgttttctgttttacccgacgtggctacggtaagacttttgaaaacctcgccatgtctccacgagtcgtaagtgggggagcgcgttgaagtgtccatttgatgtggaactttcaggccggtatcctgaataacttgctgaacagattttaggttgtcacttgtatgcaaatcggtctgacagcgaacaaaggcaaccaaaaattcagggtatgtaattcctaaatattgaagcaaatcgcgacatcgtactactggagcaaacataggaattgcatctaacaaaatatcacagcccatgaagagtaaatcagtatctgtcgtataaaccaaagccactgtacgcgtatgaaataagtttgcacatgcctcgtccgcctcaatgtcaaccgcctcgacgtatgcataccccatccatctaataagacttgcacacaatttgtgatataatcgatggttaggatgtcctcgggatggcattgtagaggtaagactgcatacgttttggtcgcgcaggcagatcgtcttgtcagtttgtcgtggacaaccgtccaaaaacatatcctgggatttgttttcttcgctaggaatacaactcgtggaagagtttcgaaacacactgtcatatgtttccgatgttttgttatacttgatagaacatgatgtgttggatgatagtagaacacgggttaagtccgaggttcccctttcatcgtggttcatggcccgtgacataattgccttggctccacgtgataatgggccgtctgtacaacgttccaatacaaatatcggatagtatgaccgttgtgttaatagccgcaataagactccaagacaatgtatcgttacagatggtccgtgtaaattctcgcgtttacccacagggtataaacgttccaacaatgtgtacatgacgttccatacgtctaccgccacgggggttaaaactccgggtggcgttgaaatgatgctgggtttaaccagtttatgttcatggataaagcgtgtcagtccaaagagccccatcaatacacttaaccaagtttatatcgtcttgtgaaaggtttcacagcggcttcagtaattcttcgatgtgatcttgtgttaattacagacgtatataatgatgtacatattttttatgacaaacattacatcaaatctggtaacttcttacgtattttattgcacagtccctattaaggaacaccccctgtattggaacacgtggaaatgttccctcccatgggccgtactattcaaatatcatgcctgtttatgtacttaagtcaccggatcgggttaaacaaacatattaacgaaactcgtgtgtttacatatgattactttttctatagtaaacattttaagtagtaaattatggatttgaggtcgcgtacagacgatgctttggacatggaattgcatgcgggttttgacgccccagaaatcgccagagctgttttaacggaaaaaacgcttactggtttaatttcgtctatatcacctctggttaatagactaagggattctattttaatattcagcgacgaaggattaattattcactgtagtttggaaacagaacaactgtatattcctataccggcaaatatgtttgaccagtataattggactgggccgagaatggttgtactcgcggcaacggagggacggtcctcgcttattgacgcgtttcgccatacaaaagatccgtcgaccccaacacggttatattttaaatttaccggacaaccccccgagcggagtattatccaaacgatggtatggcaacgcccgggtgattgtggtccagatgatcaagtacaatgttacaaacaagttgtaaaacgtgaactcgcttgttatacaatgatgtttccaaatctaactccagatataagcatttgcttaaaacgcgatcaattcacccgtttacagcgactacttaaaacttttgggtttacaacatgcttcattctaacagccacggatatgtacatccagaccgccgggggtggttttatctcatttaatgtttccttggatataaacggaagcaagcctacaccatataatttaatacgctcaatcacaaattcaaaaaggatccttaataatgttgtttatggcagcgggagtatgcgtgaatttggagtattattggaaacacacagtggattccgttctgccgtacaaaatcttaagttaacacgggatgagacgtgttatattaatttttatctcgccttaactaactcccccatggttggattgtatatccaacgttccgcacccgtgcattcttttttttatgcaacgttcttaagtcccaaagaccttaaagaaaaattaacctcgatgcaattatttgcgaacatggaatctgtgaaggatgaaccaccattaaaaaaaagacgcaatttattaacaaaaagaaacgaaaaaaataccggaaataaaatgggggggaaactccccgaaaccacatggcaggagggaatcggaattcgcgaatattgtgtggctcctccagtggaccctgcaggaaccctggattattctgaattatcacgtgaatctgacgtaatatgtacagttaaataagtgcaacttttgcttatattttacatacaaacttgtgtgtaccatagatgaacacatttttatttgttttgaattattaaacttaagacatggccgtgaatggtgaaagagctgtccatgatgaaaacctgggtgtgttagacagagaattaatccgcgctcaatcaatccaaggatgtgtcggaaaccctcaagaatgtaattcgtgtgcaataacctcagcatcgcggttgtttctcgtgggactacaagcaagcgttatcacgtccgggttaattttacaatatcacgtctgcgaagctgccgtcaatgcaactattatggggttgatcgtcgtttcggggttatggccaacatccgtgaaatttctacgcacattagcaaaattgggacgatgtttgcagacggtggtcgtgttgggttttgctgtgttatgggcggttggttgcccaatatcccgggatcttccatttgtagaattactgggaatttccatatccgcgattaccggaacagtggctgctgtgcatatccattactacaactttgttacgacattcaatggaccgcatatttatttttatgttatgatgttgggaactgggttgggaggtttactaaccgttattttatatatgtatgtcagtaaatatgaggttcttattggattgtgtatatctattgtcacactagtttcaattgtcgatgccgccaccgatttgcaagatacgtgtatatatcgtaaaaatcgccataagcaattaaacacttatacagatttaggttttgccgttgtatatacacaaaatgaccgcgggagagtatgtgaccatcgagaaagttcccggacccttaaacgcgtgtttaaaggaattcgtataatgtctgttatacccccggtgttatatatagttaccccattaatgtgggcaatctcacatataattaaattaaatcattttatcaaacttacacaagtaacgttagcagtttcaataggaggtcatattatagcatttgggttacagggttttgccgttttatatcaagaaaaaaaaaacctatgggtaattgtattatatacaacgacctcggtgacgggtatagctgtaacatttgccggcatttcatggggagctattataattctaacatcaacagttgcggcgggtttgacgtgtattcagatgatgagactaagcgttaaacctattgactgttttatggcatctcatatcactaaagtatatcacgtgtgtgtttatattataataaatctatgctatctatgtggtacatatgtatcgtaatcgagataaataaagtttttaaagttgcaaaagccgtttttattattcccaatgtcgaaaaaaacgtttccatcatttaaattccgcggtgggtgttttaatcttttatttaaggggagcgtggatgtgtcaataaaaaccaggatgaagcggatacaaataaatttaattttaacgatcgcgtgtatacaattatcgactgaatctcaacccacacccgtaagtataactgaattatatacctcggccgctacccgaaagcccgatcccgccgtcgcgcccacctcggccgcttcccgaaagcccgatcccgccgtcgcgcccacctcggccgcttcccgaaagcccgatcccgccgtcgcgcccacctcggccgcttcccgaaagcccgatcccgccgtcgcgcccacctcggccgctacccgaaagcccgatcccgccgtcgcgcccacctcggccgcttcccgaaagcccgatcccgccgtcgcgcccacctcggccgctacccgaaagcccgatcccgccgtcgcgcccacctcggccgcttcccgaaagcccgatcccgcagccaacacccaacattcacaaccaccttttctatatgaaaatatacaatgcgttcacggcggaatacaatccataccctattttcacacatttatcatgccttgttacatgcgtctaacgaccggacaacaggcggcctttaagcagcaacaaaaaacatatgaacaatattctttagatccggaaggttcaaatataacaaggtggaagtcgcttatacgccccgatcttcatattgaagtttggtttacgcgtcaccttatagatccgcaccgtcaactgggcaatgcgttaatacgcatgccagatttaccggttatgttatatagcaacagtgccgatttaaacttaataaacaaccctgagatatttacacacgctaaggaaaattatgtaataccagatgttaaaacaacgtctgatttttctgtaacaattttatctatggatgctaccacggagggaacgtatatttggcgagtcgttaatacaaaaactaagaacgtcatatcggaacacagtattacagttacaacgtattatcgtccaaatattaccgttgtcggcgatccagtcttaaccggacagacatacgcagcctactgtaacgtatcaaagtattatccaccgcactcggtacgtgttcggtggacttcaaggtttggtaacatcggaaaaaattttataaccgatgcaatacaagaatatgccaatggattatttagttatgtttcggcggtacgaattccacagcaaaaacaaatggattacccacccccagccatccaatgtaatgttttatggattcgggatggcgtctctaatatgaaatattctgctgtcgttacccctgacgtctatccatttcccaacgtgtctataggtattattgatggacacatagtatgtacggcaaaatgtgtgccacgtggcgttgtacatttcgtatggtgggttaacgattctcccattaaccacgaaaacagtgagattactggggtgtgtgatcaaaacaaacggtttgtaaacatgcaaagttcttgtccaacatcggaactcgacggacctatcacctattcgtgtcatctagatggttaccctaaaaaattccctccgttttcggccgtttatacctacgatgcatctacctacgccactacattttccgttgtagcagttataattggtgtgatatctatccttgggacattgggtcttatcgcagttatcgcaaccctatgcatccgttgctgttcataaacagaaaccaaccaaacgcgtctgtgtatatcattttattacattcgcaacacatctactgtcttgacaacatttaaaaatccattaaagagccatttccatttttaggggggggtgtggattatatccatcaagctgaaaatcgtcccatttaaagtcgtttatatctgttacatttcgaataattttaaggcaaggaaaaggttttggggatcgagctagctgcacttttaaagcatctatatgattcaagtaaatatgtgcatcccccattgtatgaattaaatctccggttttaagtcctgtaacatgcgctactatgtaggtaagaagtgcatatccagcaatgttgaacggtaccccaaggcccatatcccccgatctctggtatacttggcaggataattcaccgtttgcaacgtaaaactgacataacgtgtgacatggaggtagtaccattaaggggatatcctttggattccaagacgatataatcattcgtcggctttctgggtttgttttaattgtatctataacagtttgcagctgatcgattccttgctgtaaatagtttgattgacagtctttatattccgctccaaaatgtctccactggaagccgtaaatggggccaaggtcccccgtgtgtcttttatggaagccattcctatttagaaatttgctcgatccgtatatatcccatatgtgtatatctttagcggcgagttctttggaatcggttgacccgcggataaaccataacaactcttccacgacggccctccaaaaaacacgctttgtagttaaaagaggaaattcatttcgcaaattgtatcgagcttgcattccaaataaagataacgttccgattcctgttcgatcgcgtttccgaactccataccttaaaatatcatccacttgttttaagtactgaagttcgccggttaacgtaaaacccggcacctttgtccaacatgacaagtctcccatggtaccggtaataatcgttaaatacaaacgaccacttgatattgtgggtacattaagtaaaatttaaaggagtaattccttttataacccaatcaaccaatcagacctttaaataacgcagtccaattattgaacagaaaatacgcaatagactattttctcccaaatcccccaattttaacctggttgtggaaatgaccgccaaagtgcctagtccataactatctattaaccgctgtacttaatgatgactcttaggcgtatttttcctaaacgtaaccgtggttttacatctaacgggaacgtcgttgggtataaaatctggtgataagtcatcgtctgtatgcatgtctccggaggtgtacccgttaaggctatccacatccaggtctgaagatgagttaaaacccacttccttgggtggtatattttcatatacgtgatcatttaaagatgcttgggtttctatgtgacgtaaatccgatctttggtcaaacattgtgtttgattcatcccgaaccggaccttcatattccgcctttatccgggtgtaatgatcaggatacgttgggtcaactggactaccgtccgtatggcctatgtccagacagtggttttttcggacagttacatccaaacccgtgtctggacgaactaaaacgcgagaagtccgctgtctatttgtatcgggtgctatactgtttaacggtgcttctgtattaattacatgcgaacttgcatttacgtcgtcagataaataatttcccgttaaacagacacattccaaattccctatacctgtccctattggagatcccagtcgattaaaacgaatatacggctgatcagacacactcgatggttcggatatacgtcttaaatgtaacggagtataccgtttactggcggcaagaacctgagcataatactttgtgggtttacccccatgtgctaaaatactctgcgccacggcccgggaaaaccacatatgggtgctggtctctaacacaacccaactgtgtgttgacattgttctgaccaactgacccgcaaaatataaaaaccgtccctgggcacgtagcgcctttaatatataaggatcgtttaatcccccatccccccaacatgcatatccaataagcatcatattaattaagtattgaaaatggtggtgcaaaagcgtaataagttcaaccgccgcaacaattgcagctgcggttccatttaaaccatcccgccactcttcctttcgccataatacactaatacgcaaaagcgcagtaagagcgctggcagttgttgctgctaaaataaacgcaactcctgtgcccgctgagaccgcaggacccgtttttaaatgtcgtctaagcaaatcatctggaataacagacgcgcgcggccctcgaatccgtcgaaattgaagtttgagatggcgacataccctggcgtccacaacgtccaagaaccataacatccacccgtagccagtagccgtgtaagccgcaatttcttgtacacgtattcttgtatccgggctggggtttgtaggatcatctggacgcataaaatacatatacttttgcacagctcctaacgcctcacgtagctcctgacatattccccggtaatccgaatttataactttagatttaaaaggatgtctggatattggtttattggcaactacggatgaaaacaacaaaaccgtggatttagactttttatttaccttctctgaagtcaccggtacctcggctcctgtggtgtatttgagatactgccaatatgtattttcataaacccaccaaagtccatccccagaaagtttcaggtcatccaaacatctttgaattgtttccatataacgctgcataaacccgtcatgaacatcgttagacatacacgagaccaccaacgattcaggaacattattatggtgtaatccaagcagaacactgtgtctttcggtactttgtaaaaccggcgatgttaggctgtcggtcttttcagataaagcctttaccgccgtctccaaagcctcgccgggcgttggaataagacatccatccctcacgcgctcgctggttatgcgttgggaaatagaacaccagtcccgggtaggtgtgggcaaatcacgttcgccggcattaaaactttggtaactaccatcataagatttacgcgttctatcatcgctggaaaaggaacgcgcaaaccgagaaaacattgcgatatggacaaattatatcttgtaaaggtcgatcctcacggaccccccacacaacacacacaacaaattttaaggtctaaacagagattttattttacaaactcctttgtgggtgtggctaggaaacgttcttttcatcctaatgaaaaaaatcacaacccttaatattttcgtagtaaatgcatggctacgcttttccaatccaaacccagaatttcattcctgtattgcataagattttcggctaggtccacggagggaatgggctgttctcggggatagatggtctccaatcccacaaaacggaagttcatctctataggtgatgcctgaactatcctgtcttgctctttgggtaaaacgtccgttgtcggtcgaatccccaaagtttgcattgcatcatcgcggtctttccaaaaggatgttaaagtttggtgagcgtaaagaggacttgctgccaacattaaagtattatatgcatctaaaatacctcgggggatgtaaattgaacatcctccgtacaacgcagcaccggagagaagcaacaaaagaagatttgcatgacccaacacccgttgtaacaataaaacggcccccaggtacgcgcttaccattaaatcggtctcactttccttataacaatcggcaaactctatcataaaatttgtggctgctgtgcgaacagcctcatatccggttaattcgtgtgcaatagttgcgtaggattcacaaacagttgggaggtcgacctcgcctaacagtaatacctctaaatcacataacaggtcactattaaccgggatatagtaatagggcagagattcacagaccgcgatgtaagccgaacgggaatggtaaggagcagctaaatacattgcagttgctctacagatccagttcaacattcctccaccaagagtaacatacaacgtaaaaaatgacgctaacatttcccgttccgttggggtaaattgtggctttaaactatgtgtacgtgaaaataaaaaccattcggcaagttccatgtgaccggtagcatatcgcaccaaagatgtagatggttcacttatagcaattcttagttcgggccaatatgccaacgccccaaaaaaaccacgcataatggcaaccgttggaccccgatttggcaaaaccaactgtgtcacttggagtacgtcgggtacggcttctcgtggtaatccggcaagatggtcttctaaccaacatggatcccccacgccaaaattatcgttacgtcccaaaaaaatacagtttgcgctaatacgaattgccgcgtctaacaaaaatcctaatccatctccatgtgaaatgcgattagaaatagcgcatgctgctgtggataatatcatgtgatgccaaatggccgttccttggcccacagcacgtaaggacacgtcataaaacccaggaatgtgttgtacatacattttacccgcattatatggaagtgcgtagacggaattccaacgcgggccgtatttatgtgttttactggaagcccgcctatctaaaaatacatcttcaactaaaatacgttctatagaaattggctgggccataaattcaataggaaaaatcaataaaagttcaccaagtgtcatgttaggaagggctggtatagttctcaaaatctgtgggggtgtcatccgggaagtatcaaactgataccgtaaatgaattgggtcgtataatccttggaccgtaatatattcgcgacgggtacattcgcgcatagcaaaccaggactcatcaaacccattatgcgctaacatagagcctgttagggtaacaggttcaacacaacgttttgatacattaagttcctttgataccgcaggctccataacctttgcaatgcgaagatcggtactgtaacttatttccgggtctaacgtaaaataaacctcatccgcgtctcgactgcaaacttgacttacagaaaaataatcctcctccgcctctccctcgtcgtcgatcgcgtcctcctccgccgcgtcctcctccgcctctccctcgtcgtcgatcgcgtcctcctccgcctctccctcctccgcctctccctcctccgcctctccctcctccgcctctccctcgtcgtcaatcgcgtcctcctccgcctctccctcctccgcctctccctcgtcgtcaatcgcgtcctcctccgcctctccctcctccgcctctccctcgtcgtcgatcgcgtcctcctccgcctctccctcctccgcctctccctcgtcgtcgatcgcgtccgtattgatgttgatttcctcattagcttccctctccgttaatttaaatatgcgattttcatgtctggaagttgatgtattttgttcggatccattatatgtagaatgatgtaaggcgtatcccggaaaatcatccgatgcgtcagaactgctgtcctgatccatctcggagttcagtagttcttgaaccgcaactaatgtttctgaattggacaatatctggggtgggtgtgtataccaattggttgaccgataacgtgttccgtgtgtgtgacggggggagtctgtggtattagacgatatccgctgtcggcgggattgcctccggttataatgacccgactgcatacttataaccgagacaaacaaacgcgcctgtaaaacatcccagggtcgcggtacgcaatacgcatacactcgttggggcttcttttatatatgggactttagagcacatgacagacataccatatacggcgcattgtaaaaataaaaaacgcatgcacgttttcgtaatttatttacaccctctaccccaatgacgtttaacgcgttaaaaacccacacgtgggtgggcgtggtgggtcccccggcaggatctcggatggggacggaggtgctaaaatcatagcttcgatgctactaccgtagtttctattttcaacaacttttgcgtaaggatgatccgctcgtacatgtctcggttcttgaggatgtttgaccgcatatgcgtctaacttacgcttaatgtggtgggtaagaaaacccaccgaccgtggtaaatgaaccgaaaatgagggttgttgaaccaacggagatttgttttcttcaacaagaccacatctaactagaggcagtcccagttctcggcggcggtaatttatttccctcaaggcagacgctgttagtggtttcccttctaataacacaatgccgtggttgcataatacaggatgaaacgcacacgtgaactgtcgacgttcggtccaggtgaattttaaagccgcaaacacgtccgggtgtgcagattgactggcgtacaaacgccaggaaaattcacgcgttacggttaaatataaatgtaggtacagaagacgcgccaaacttgccacctcacgataatatctaagtagaatactttgcctgagttgcgtgtaagctttctggtcagggttttgtatattaagacctattgtcgtccttttcgccgttccttggagataacgtataatcgatttacaataagtaactagtagttttgtgtatgcttcttcccgggcgcgtagttctacggtaaacgaatcctggacctcctgaacgtaagctggaagccccgtcggttgctttggtggactaggcaatcgaacggaaccccgggttgttaaattaaacatttcaacatggtctttggttgaaacggttgagataacgtcatctggatccggggataaaaccatcatatcggaatataggtcctcattaataggaaaacatgagaataaatcctcgttccaggtttcaagacatgatagtaaacgcggcccttctgaaaaatcaagatcccgtattaactgttgatataaaattttagggctagctacccaaggcggagacggagcagttttaactgcatgtgaatataacgacgtttcaaatccaatatccgatgctacatcaccaaacaacgattcatcaaatgcgtccacaaccgcttgttccgttttactacgattccacgtatctgtactaggatgttcggttcctaaattacactccatacttatagagtaaaatctttagtttaaataagcgattccctttatcaaaacccgccgtctaatggggtttgtttggtagcaactgattataaactgttcataataccacgtggtactatttaaacagtttataatatgtgacatataatacacatttataataaacacaaaccacgactgtcttttatacgtttatttattatacataataccgggtaaaccgttactgcgtaattatatccctattttcgcgtatcagttcttgatgcagaacgggccctacttcgattagttatacgcccagtcgtttgtgtatccgttcgactttttggcttacgaacttgtgcgtacataggttcattacccatgcccccctgtaaatctccagtttttcgattatgtccacgtttggataccgatgctccttcacctaggtctgcttcattagcggcttgtattaaatttaaaccctcatgcaccgtaatacgaataacggctccggttaacaaacggtctaattcggcgttattccttgggggattactattccaagccgcttcggcagccttttgtgcctgcatggcggctacgcgccggaccgcttcacaaaagacgcgtttgttatatgatggcgtaggaccgcaccacgagcttgttgcggtttttggtgcagtgctgaaggaaattggtctcccgctggcaattgcgcctgctcccgggggagctcgcttcggtgaatcctctaatttaggtttaaccgccgcatttttagtaaaagatctagatggtttttctacacttagcgggttttcatatacagcatcttcaaccagttcatgtctcaaacgggcctcccgaaaggcggccactacttcatcgatgtcttcaaagtcatcttccgatccgctggagtcgtttggttgatgtacgcgaggggtcgtatttttatgttcaaaataaagatccgcgtacactggagaaggagaatcggccccaactgtggtaatgtaacccaacgagtcgtctgaatcatcggggggtcctacgaccacacttcgccgcgcggttcgatattgtccggaataactaggcgttgttttacgacgcactgcattagagcgacaaagtctgtcaccgtcggaagatgccattacgtaaataaacgatagggtcgtgaaatatccaaacacggcagaccgcgtattaaacaggggccctcttatacacgcctgccccttttataggcaaacgggtttaccacgtgctgcgtaatacagaacgagtaaataaccggaaacacgcatgataagctaacgaaataagggctacacacacccccaaaagggatgcgtagaagaaaagggtggtgatcattgatccgtcgatataaactccacgagccgaacagctggcatgccaaaaattccgttctgcaaagtttggctccccactgctgtcttcacaaaaaaataaaatttgcatcgttattaatatgaacgaagcggtaattgatcccatcttggaaacggcagtaaatacaggtgatatgttttgtagccaaactattccgaatcggtgtttaaaagatacaattttaatagaagttcaacctgaatgtgcagatacgctgcaatgcgtgttagacgataaagtaagtcgacatcaaccgttgttactccggaaccacaagaaactcgaactgccatctgaaaaatctgtaacacggggcggtttttatatgcagcagttggagctgttggttaagtcggcgcctcccaatgaatacgcactgttgttaattcaatgcaaagatactgcccttgctgatgaagacaatttttttgtcgccaacggagttattgatgcgggttacagaggagtaatttcagcccttttgtattaccggccaggagtaaccgttattttacccggacatttaacaatctacttgttcccggtaaaattaagacaaagtcgccttctcccaaaaaacgttcttaaacatctggatccaatttttaaatcgatacaagttcaacccttatcaaactcgccgtcaaattatgaaaaacccgttatacctgaatttgctgatatttccacggtacagcaggggcaacctttacatagggattctgcagaataccatatcgatgttcccttaacctacaaacatatcatcaatccaaaacgccaagaagacgcgggatatgatatttgtgtaccatataacctatatttaaaaaggaatgaatttataaaaattgtcttaccgattataagagactgggacttacaacatccgagtataaacgcttatatttttggaagatcatcgaaaagccgatcaggcattatcgtgtgtccaacggcatggcctgcaggagaacactgtaaattctacgtatataatctcacgggtgatgacatacgtataaaaacgggagatcgtcttgcacaggtcctgttaatagatcacaacacccaaatacacttaaaacacaacgttttaagtaatattgcatttccttatgctatccgcggtaaatgtggcataccgggtgtacaatggtattttactaaaacgttagatctaatagccacacccagcgaacggggaacgcgtggatttggttcaactgataaagaaacaaacgatgtcgattttctactaaaacattaaatgtaataaccacgccagccagcaatgttttaattttatatacaaaataaaaacatacaccagaaacgtttttagtttttatttcaatatttatacaagcataacatgggatttcttgatcgcgggggttgtgcgttgtacatcttgcgtctgttttggggtcaacacgggctgaagagtttctgtcggatacgttttttttgttaggttagatgtgttattatccgatacttctataagtgggggtttaatttcagataattgtgtcgcctccgatttaataggtgatgtttttaaacccacattttcccctttagctatagataattcatggttgtgggaaacatcaaacgatgcctgaggtttagcaacgaccccaagagttttctccaaaagaacaacatcagacatgaccacttcactttcagcggtcattctcagggtttgatcgacaatatcatccgtagtaacatccaccgcgccaaccgataaatacaaatgggtaattgcagctaaacacatatcagcaagccgttttgagttttccatgtgtgaacggaccacggcgttaagaccggggttatcttcagtaaaatggtgctgttttaaacattcaatgttacgagaacatgcagcgtaagttcgcgccaaagcctgggcgcggaccaaacgacgggtattatctgcagaagcgactacgtcttctaacgttagaggtgcaggcaataatccattcacagcggttaaagcctcttggaggcggagcagggcggctccttgggggtgcgtgtttacacgcacctcttcataagatggctcttcagttggtattcgagcatatccacataagctggcacacaccgtctgcatgattgactggctttccaacgtattgaactatggataaatcctccaaaccgacgattcggttattatttgccacaaagggatgtgcaatctcccactcgctgttgttgcttaccgggcagataagcacagaacctctgtatgtggtgagttatacttggactcccgacttagatgacgtctttgtcaaaaatgggagggaagagatcacgcaagtaatcccaactaaacgcccacgtgaagtaactgaaaacgatgaagaaaaccaaataatgcatttattttgtagtagggacgtcaacgttattttttatttaattggtggattttcaactggagatgtacgatcccgggtctggcctatatttttttgttgttttaaaacccaaactgattttaaagctttatataaggcgttatggtatggagcacccctaaatccgcatataatatctgataccctatgtatatcggagacgtttgacattcactcggaagttatacaaactctgatggtaacaacacaccatttaaaccgaaagggattatcggacaacggcctatgcatcacagaggcaacactctgcaagttagttaaaaaatccgttggtcgtcaggagctaacatcattatatgcccattacgaacgtcaagtattggctgcatatcgacgactctactgggggtatggatgctcgccgttttggtatattgttcgatttggaccctctgaaaaaacgctagtgttggctacacgctattacttgttacaaacggacacaagttacaatacgttggaaacccccttatatgacttacaggcaattaaagatttgtttttaacttaccaagtcccggcattacctaattgtagtgggtacaatatttcggacttgttgtcttttgataaactttccatgttttgttgttcctcaacatatacacgaggtttgacagccaaaaatgctctatcgtacattttacagcgaatacatacagacacaacggaaatacacgcagtatcggagtatattaccaacgatagaaaaggccttaaagttccagaccgtgaatttgttgattatatttatctggcacattttgaatgtttcaatcggaaacagatcgcagaccacctacaagcggttacatactcagattttgtgaataaaccggtcctcttaaaatcatccaacctgggaaaaagagctactgctaatttttttaatcatgtacgttctcgtctcaacatgcgtgactatataaaaaagaacgtaatttgtgatgtcactgaacttggacctgagattggacataaatatacaattactaaaacatatactttaagtcttacgtatgccgcaaaacctagcaagtttataggcgtatgtgacctagctacaacgctaactcgtcgtgtggaaaacattgaaaaacaatttagtccatatggatggtcctccactattccctcaaatccacccggttttgacgaattgtctaattttgaggattcgggtgtttccgcggaggcgttacgagcagccaactttgcaaacgatacacctaaccaaagtggtcgtactggttttgatacgagcccggggattacaaaactattactgtttttctctgctgccactgggatagccacacatgatgtatccatcctgagttataaaactccattagaagccctcatcggccattctgaggtaactggaccaatgcctgtatatcgggtagccttgcctcacggcgcccaagcatttgctgttattgctaatgatacgtggtcatcaataacaaaccgttacactttaccgcacgaggctcgattaattgcggaggaccttaaacaaattaatccatgtaattttgttgccgcttcactacgagatatgcagttgactttactattatctacgtctgttaaaaacgtttctaaaatttcatcaaacatacccaaagatcagctttatataaacaggaatgagctatttaatacaaatcttataatcacaaacctcatacttgatgtagactttcatataagaaaacccatcccattgggtattttacatgccggcatgcgagcatttcgtcatggtattttaacggccatgcaattactttttccaaaggccgtggtaaaccctaacaaagacccatgttatttttataaaactgcatgtcctgaacctaccgttgaggtgttggatgatgataatttattggatataaccagccattctgacatcgatttttacatagaaaatggcgaattatacacgtgtgtagaagagaattatacagaggatgtatggttttttgatacacagacaacgtctgaagtccatacacacgccgatgtatcaaacaatgaaaacttgcatgaaactctaccctgtaactgtaaagagaaaataggtttcagggtatgcgtaccaatcccaaatccctatgcgttagtggggtcttccactttaaaggggtttgcacaaatattacagcaagcggtgttgctggaacgggaatttgttgaatatattggtccgtatttacgggacttttcgtttatagatactggtgtttatagccacggacatagtttaagactgccttttttctccaaagtaacaaccacagggacggcggttggacaactactcccattttatgttgtacctgagcagtgtattgatatattagcgtttgtgacatcacatagaaacccggcaaactttcattttcattcaagaccgcagtcgaatgttccagtgcaatttattttacataaccttgggggggaatacgcagagttttttgaacgtaaggttgcgcgtaataaacaaatatttagctccccgcaaatatctttaacaaaggctctaaaagagcgcggggtaacttgtctggacgcatttacactggaggcctttgtcgacagcacaatattagaatctattgtggagcatattgctgttcatttccccgggcgtgatcgcgaatataccttaacatcatcaaagtgtatcgccatcaaaagggactgggtgttatttcagctcatatgcggaacaaaagggttcacttgtcttcgatatccccatcgcggaggaagaacggctccccggacatttgtgtctctgcgagtggatcatcacaaccgtttgtgtatttcgcttgcacaacaatgttttgctacaaagtgcgatagcaatcgcatgcatacaatctttactctagaagtacctaattatccaaatttaacttcgagttaacaccaaccgtgtgatactacatcgtgcttgaattgccatcttccacgggtcatgcaggctttaggaatcaagacagaacattttataattatgtgtctacttagcggacatgctgtttttaccctatggtataccgctcgtgtaaagtttgaacatgagtgtgtgtatgcaaccacggtgattaatggtggaccggttgtatgggggtcttataacaactctcttatatatgtaacgtttgtaaaccactcaacgtttttggatggcctatctggatacgattacagctgccgggaaaatctattatcaggagatactatggtaaaaaccgctatttctacacctttgcatgacaaaattcgaattgttctgggaacacgtaattgtcacgcttatttttggtgcgtgcagctaaaaatgattttttttgcatggtttgtatatggtatgtatttacaatttcgacgaatacgtcgtatgtttgggccattccgatcatcctgtgagttaatatcccccacatcatattcactgaattacgtaacacgggttatttcgaacattcttcttggttacccatatacaaagttggcaaggttgttatgtgatgtttccatgcgacgggatggtatgagtaaagtatttaatgctgaccctataagttttttatatatgcataaaggtgttacgttattgatgcttttggaggttatcgctcatatatcatctggatgtattgtgcttttaacgcttggcgttgcatatacaccatgcgcgttattataccccacatacattcggattctggcctgggttgttgtatgcacgctcgctatagtagagcttatatcttatgttagaccaaaaccaaccaaggataatcatttaaatcatatcaatacggggggaatacgtggtatatgcacaacatgttgcgctacagtaatgtccggccttgctataaaatgtttttatatcgtcatatttgctatagcagtggttatttttatgcattacgaacaaagggtgcaggtaagcttgtttggggaaagtgaaaactcccagaagcattaatcatgtgactaaacacgcccattgcggggttgggtgagcctataaattctacaacattggcggaagatacaggcaactgcaaacacgcaattgtcagatattttgcagccatggcctctgcttcaattccaaccgacccagacgtgtctactatttgtgaagactttatgaatttgctaccagacgaaccttcggatgactttgcattggaagtcaccgattgggcaaatgatgaagctattggctccactccaggcgaggactccacaacgtctagaactgtgtatgtggagcgtactgcagatacagcatataatccacggtattccaaacgaaggcacggaaggcgtgaaagctaccaccacaatcgcccgaaaactttggttgttgtattacccgattcaaaccatcatggaggaagagacgtggagactggatatgcacgcatcgaacggggacatcgacgatcatccagatcttataacactcaaagttcaagaaaacaccgtgatcgatccctgtcaaatcgaagacggcgtcctacaacgcctcctgcaatgaccacgggagaaagaaatgatcagacacatgacgaatcgtacaggttgcgattttccaagagagacgcccgccgagagcgtattcgaaaagagtatgatatcccggtcgatcgaattacgggccgtgctattgaagtcgtctccaccgcgggagccagcgtgaccattgactcggtacgccatttagatgaaacaattgaaaaactggtagtccgatatgccacaatacaagagggtgattcatgggcttccggtggatgttttccggggataaaacaaaacacatcttggccggagttgatgttgtacggacatgaactttatcgtacctttgagtcatataaaatggactcacgtattgcccgcgcgttgcgtgagagagtcatacgtggagaatctttgattgaagcgttggagtctgcggatgaactgttaacgtggattaaaatgttagcggcaaaaaacttgcccatctacacaaataatcccattgttgcaacctcgaagtcacttttggagaatttaaagttaaagctggggccttttgtaagatgtcttcttctaaacagggacaacgatttggggtctcgtactctccccgaactgttgcgccagcaacgttttagtgatatcacgtgtattactacttatatgtttgttatgattgcccgcattgctaatatagttgtccgtggctctaaatttgtggaatatgatgatatcagttgtaacgttcaagtgttacaagaatatacacccgggtcatgtctggccggtgttttagaggccctaatcacccaccaacgcgagtgtggtcgtgttgaatgtaccctctcaacttgggccgggcatctttctgacgcccgtccatacggtaaatattttaagtgtagtacctttaactgctaaaataaaaaatacctttttcatgcttgtcaaaacatactaatttgtatttttaatcattaagcatatttacctgttagaatagtaaatacctatttcatgcttgtaaaacatatcaatttatatttttaatcattatacaccaccccttgattttatcaattgtttatgtgattctatattaataaaagactaataaaaatgtaatattgtgggagtttttaaggcgacgttggggatatatgggcgggattacattgctttcaaaccaatatctttgcaattccgtctctgattcgggtaaaacacacaccagacgtgtaccgaacgtttaattaatggatacaacgggagcttccgaaagcagtcaacccatccgagtgaatcttaaacctgacccgttggcgtcgtttacacaagttataccgccactggcgttggaaacaacgtggacatgccctgccaactcacatgcaccgacgccatcccctctgtacggtgttaagaggttatgtgctcttcgagcaacatgcggccgggctgatgatttacacgcttttttgattggacttggacgtcgagataaaccatctgaatccccaatgtatgttgacctacagccgttttgcagcctcctaaattcccaacgactgttaccggaaatggctaattataacaccctatgcgatgcacccttcagcgccgcaactcagcagatgatgctggagtccggacagctgggtgtacatctggcggctattgggtatcactgtcattgtaaatcccccttctcggcggagtgttggaccggtgcatccgaggcatacgatcatgttgtatgtgggggaaaagcccgagcggctgtcggcggactatgaactacacatttaaataaaaatacgtacaatcgaaaaaaggtgtattttatttagtgattacatcaatacgccctccgtaggttcggcaaatctaacccggtgacagaccggctgttgacggggggatcctttcaatattccacgaatgttggaaactgttggtcttccttgggctgttagggttgggagagtgggtcggtctgacgtggtaagtgcggcttcaccagagtcttctgtcaagttgcatgttaacgtcgacgttatacaaggtgtttcagtggtattttgcgcgatattctcccaaaacataagacgttgcatatgcatatcataaatattaccccgccataaacagagatctctgttacttaaaccgtgtgtgcggagaaatgtacccatagatggagccagtaaatgcaagcccgtaccacattcatacccaagcgttgtggatcgcttttccttcatcgccaaaataataaatgtccttgcacctccaggcgtcattgcacgccctattagacgggcaaggctaagacgttcgccgggtttgctatatttgccaataattacataggttttggtacaggtaatgtgtaacgttcctccgcctggcaggtctacagttctccccgcaagcactcgtaataaacatcgcgtttctgacgcgggattttcctcggcggtggcgtttaaactgggacgcaccagagtggagcccataataaatgcgggaacatgcccatatgcaagtgtctcagaaattacatgcattttatgattttacgggggtgggttacgataatagctattaaacaaacacccaataaagcattttttgtagaacctttattgggtaacacagtcttttcacgtgacaggcaatgtataaataacgtacggatgcacttaagatgtatcgcacataaatttatataagctgtagcaaagtataagcaaatcctgttaatattatatttttgggatccgcaatgtccagggtatcggagtatggggtaccggaaggtgttcgggaatctgatagcgatacagactctgtgtttatgtatcagcatacagagcttatgcagaacaacgcgtcgccactcgtcgttcaaacaagaccaccggcggttcttattccactggttgatgtcccaaggccacgatcccggagaaaggcgtccgcgcaactgaaaatgcaaatggacaggttatgcaacgtactgggtgtagtactccagatggcgacgttggctttggtgacatatatagcttttgttgtgcatacacgcgcgacaagctgcaagcgagaataaataccttccccttccggacagtagtttcatgtagttgagttgggaggttcctcgggaaaaacggcaacaatggcgaccacgacagcagtaagggtgagaataccaaaaagaattaaaaaagccggtacacagcatttgcgaattcttagaaaagccagctgaagtctgtggattccatcataagcgcagtctaggcaatcgtaagactgttgggtggtgccattctccacgtgaggaaaaagaggcggggagaacaccagactctcgcggcttctgtaaggggggggcgcgtctgccacggcctcggcgtatgtgggtaggtaggggatgggggtcgcaacgtcatccatgctgggggacgacgtgagggtgaccggcggggtcccaggtcggcgggagtagtgcacggtcgccatccgagcagtaaacgaggggtggacgcaaaaggcgcgggttttgttaaaggctggcgggggggggtttcccggcaaaaaatcccatcccccccgatggtcgccccgcaaacgcgcggggaggtggggtcgcttttttttttctctctcgagggggccgcgagagggctggcct

SEQ ID NO: 48 - protein, 278 aa, Varicella zoster; identical to SEQ ID NO: 33

SEQ ID NO: 49 - protein, 180 aa, Varicella zoster; identical to SEQ ID NO: 34

SEQ ID NO: 50 - protein, 102 aa, Varicella zoster
MAGQNTMEGEAVALLMEAVVTPRAQPNNTTITAIQPSRSAEKCYYSDSENETADEFLRRIGKYQHKIYHRKKFCYITLIIVFVFAMTGAAFALGYITSQFVG

SEQ ID NO: 51 - protein, 1310 aa, Varicella zoster; identical to SEQ ID NO: 38

SEQ ID NO: 52 - protein, 467 aa, Varicella zoster
MDTILAGGSGTSDASDNTCTICMSTVSDLGKTMPCLHDFCFVCIRAWTSTSVQCPLCRCPVQSILHKIVSDTSYKEYEVHPSDDDGFSEPSFEDSIDILPGDVIDLLPPSPGPSRESIQQPTSRSSREPIQSPNPGPLQSSAREPTAESPSDSQQDSIQPPTRDSSPGVTKTCSTASFLRKVFFKDQPAVRSATPVVYGSIESAQQPRTGGQDYRDRPVSVGINQDPRTMDRLPFRATDRGTEGNARFPCYMQPLLGWLDDQLAELYQPEIVEPTKMLILNYIGIYGRDEAGLKTSLRCLLHDSTGPFVTNMLFLLDRCTDPTRLTMQTWTWKDTAIQLITGPIVRPETTSTGETSRGDERDTRLVNTPQKVRLFSVLPGIKPGSARGAKRRLFHTGRDVKRCLTIDLTSESDSACKGSKTRKVASPQGESNTPSTSGSTSGSLKHLTKKSSAGKAGKGIPNKMKKS

SEQ ID NO: 53 - protein, 305 aa, Varicella zoster
MDVSGEPTVCSNAYANEMKLSDSKDIYVLAHPVTKKTRKRPRGLPLGVKLDPPTFKLNNMSHHYDTETFTPVSSQLDSVEVFSKFNISPEWYDLLSDELKEPYAKGIFLEYNRLLNSGEEILPSTGDIFAWTRFCGPQSIRVVIIGQDPYPTAGHAHGLAFSVKRGITPPSSLKNIFAALMESYPNMTPPTHGCLESWARQGVLLLNTTLTVRRGTPGSHVYLGWGRLVQRVLQRLCENRTGLVFMLWGAHAQKTTQPNSRCHLVLTHAHPSPLSRVPFRNCRHFVQANEYFTRKGEPEIDWSVI

SEQ ID NO: 54 - protein, 71 aa, Varicella zoster
MDVRERNVFGNASVATPGEHQKFVRELILSGHNNVVLQTYTGKWSDCRKHGKSVMYNTGEARHPTCKAHQR

SEQ ID NO: 55 - protein, 331 aa, Varicella zoster
MQRIRPYWIKFEQTGGAGMADGMSGINIPSILGCSVTIDNLLTRAEEGLDVSDVIEDLRIQAIPRFVCEAREVTGLKPRFLANSVVSLRVKPEHQETVLVVLNGDSSEVSCDRYYMECVTQPAFRGFIFSVLTAVEDRVYTVGVPPRLLIYRMTLFRPDNVLDFTLCVILMYLEGIGPSGASPSLFVQLSVYLRRVECQIGPLEKMRRFLYEGVLWLLNTLMYVVDNNPFTKTRVLPHYMFVKLLNPQPGTAPNIIKAIYSCGVGQRFDLPHGTPPCPDGVVQVPPGLLNGPLRDSEYQKSVYFWWLNRTMVTPKNVQLFETYKNSPRVVK

SEQ ID NO: 56 - protein, 541 aa, Varicella zoster
MEFPYHSTVSYNGVTFYFNERATRAYFICGGCLISIPRKHGGEIAKFGHVVRGVGPGDRSVASYVRSELNRTGKTWAVSSNNNCVFLDRVALLAAGSGAVDRDLCGTFDVEVEDPTLADYLVSLPVTHLTLVAGVDVTRENKLKLFPTPTAINTTNGFMYVPNEASFSLVYMRMLELPESLQELVSGLFDGTPEIRDALNGSNDDEKTSIIVSRRAADVVTEDVKADDVPISGEPYSEKQPRRRKKSDHITLSNFVQIRTIPRVMDIWDPRHKATTHCIRALSCAVFFADEVIFKARKWPGLEDELNEARETIYTAVVAVYGERGELPFFGHAYGRDLTSCQRFVIVQYILSRWEAFNCYAVIEDLTRSYVNALPSDDDTDQVAQDLIRTIVDTANSLLREVGFIGTLAETLLFLPLPQLPCYKETSHLAKKEGVRILRLAKTGVGLSDTVPVDVSVTERHEYEISRYLDTLYSGDPCYNGAVRLCRLLGSSIPIALYYNTISGNAFEPYFAGRRYIAYLGALFFGRVHQTPFGDGKKTQR

SEQ ID NO: 57 - protein, 258 aa, Varicella zoster
MSASRIRAKCFRLGQRCHTRFYDVLKKDIDNVRRGFADAFNPRLAKLLSPLSHVDVQRAVRISMSFEVNLGRRRPDCVCIIQTESSGAGKTVCFIVELKSCRFSANIHTPTKYHQFCEGMRQLRDTMALIKETTPTGSDEIMVTPLLVFVSQRGLNLLQVTRLPPKVIHGNLVMLASHLENVAEYTPPIRSVRERRRLCKKKIHVCSLAKKRAKSCHRSALTKFEENAACGVDLPLRRPSLGACGGILQSITGMFSHG

SEQ ID NO: 58 - protein, 579 aa, Varicella zoster
MTARYGFGSISFPNKCGIFLSTTKNFIAPNFPIHYWTAPAFELRGRMNPDLEKNTLTLKNAAAVAALDNLRGETITLPTEIDRRLKPLEEQLTRMAKVLDSLETAAAEAEEADAQSEECTRTEIIRNESIHPEVQIAKNDAPLQYDTNFQVDFITLVYLGRARGNNSPGIVFGPWYRTLQERLVLDRPVAARGVDCKDGRISRTFMNTTVTCLQSAGRMYVGDRAYSAFECAVLCLYLMYRTSNSVHEPQVSSFGNLIEHLPEYTETFVNYMTTHENKNSYQFCYDRLPRDQFHARGGRYDQGALTSHSVMDALIRLQVLPPAPGQFNPGVNDIIDRNHTAYVDKIQQAAAAYLERAQNVFLMEDQTLLRLTIDTITALLLLRRLLWNGNVYGDKLKNNFQLGLIVSEATGTPTNNVILRGATGFDGKFKSGNNNFQFLCERYIAPLYTLNRTTELTEMFPGLVALCLDAHTQLSRGSLGRTVIDISSGQYQDRLISLIALELEHRRQNVTSLPIAAVVSIHDSVMLQYERGLGMLMHQPRVRAALEESRRLAQFNVNSDYDLLYFVCLGVIPQFASTP

SEQ ID NO: 59 - protein, 605 aa, Varicella zoster
MAAEADEENCEALYVAGYLALYSKDEGELNITPEIVRSALPPTSKIPINIDHRKDCVVGEVIAIIEDIRGPFFLGIVRCPQLHAVLFEAAHSNFFGNRDSVLSPLERALYLVTNYLPSVSLSSKRLSPNEIPDGNFFTHVALCVVGRRVGTVVNYDCTPESSIEPFRVLSMESKARLLSLVKDYAGLNKVWKVSEDKLAKVLLSTAVNNMLLRDRWDVVAKRRREAGIMGHVYLQASTGYGLARITNVNGVESKLPNAGVINATFHPGGPIYDLALGVGESNEDCEKTVPHLKVTQLCRNDSDMASVAGNASNISPQPPSGVPTGGEFVLIPTAYYSQLLTGQTKNPQVSIGAPNNGQYIVGPYGSPHPPAFPPNTGGYGCPPGHFGGPYGFPGYPPPNRLEMQMSAFMNALAAERGIDLQTPCVNFPDKTDVRRPGKRDFKSMDQRELDSFYSGESQMDGEFPSNIYFPGEPTYITHRRRRVSPSYWQRRHRVSNGQHEELAGVVAKLQQEVTELKSQNGTQMPLSHHTNIPEGTRDPRISILLKQLQSVSGLCSSQNTTSTPHTDTVGQDVNAVEASSKAPLIQGSTADDADMFANQMMVGRC

SEQ ID NO: 60 - protein, 1194 aa, Varicella zoster
MAIRTGFCNPFLTQASGIKYNPRTGRGSNREFLHSYKTTMSSFQFLAPKCLDEDVPMEERKGVHVGTLSRPPKVYCNGKEVPILDFRCSSPWPRRVNIWGEIDFRGDKFDPRFNTFHVYDIVETTEAASNGDVSRFATATRPLGTVITLLGMSRCGKRVAVHVYGICQYFYINKAEVDTACGIRSGSELSVLLAECLRSSMITQNDATLNGDKNAFHGTSFKSASPESFRVEVIERTDVYYYDTQPCAFYRVYSPSSKFTNYLCDNFHPELKKYEGRVDATTRFLMDNPGFVSFGWYQLKPGVDGERVRVRPASRQLTLSDVEIDCMSDNLQAIPNDDSWPDYKLLCFDIECKSGGSNELAFPDATHLEDLVIQISCLLYSIPRQSLEHILLFSLGSCDLPQRYVQEMKDAGLPEPTVLEFDSEFELLIAFMTLVKQYAPEFATGYNIVNFDWAFIMEKLNSIYSLKLDGYGSINRGGLFKIWDVGKSGFQRRSKVKINGLISLDMYAIATEKLKLSSYKLDSVAREALNESKRDLPYKDIPGYYASGPNTRGIIGEYCIQDSALVGKLFFKYLPHLELSAVARLARITLTKAIYDGQQVRIYTCLLGLASSRGFILPDGGYPATFEYKDVIPDVGDVEEEMDEDESVSPTGTSSGRNVGYKGARVFDPDTGFYIDPVVVLDFASLYPSIIQAHNLCFTTLTLNFETVKRLNPSDYATFTVGGKRLFFVRSNVRESLLGVLLKDWLAMRKAIRARIPGSSSDEAVLLDKQQAAIKVVCNSVYGFTGVAQGFLPCLYVAATVTTIGRQMLLSTRDYIHNNWAAFERFITAFPDIESSVLSQKAYEVKVIYGDTDSVFIRFKGVSVEGIAKIGEKMAHIISTALFCPPIKLECEKTFIKLLLITKKKYIGVIYGGKVLMKGVDLVRKNNCQFINDYARKLVELLLYDDTVSRAAAEASCVSIAEWNRRAMPSGMAGFGRIIADAHRQITSPKLDINKFVMTAELSRPPSAYINRRLAHLTVYYKLVMRQGQIPNVRERIPYVIVAPTDEVEADAKSVALLRGDPLQNTAGKRCGEAKRKLIISDLAEDPIHVTSHGLSLNIDYYFSHLIGTASVTFKALFGNDTKLTERLLKRFIPETRVVNVKMLNRLQAAGFVCIHAPCWDNKMNTEAEITEEEQSHQIMRRVFCIPKAILHQS

SEQ ID NO: 61 - protein, 156 aa, Varicella zoster
MYESENASEHHPELEDVFSENTGDSNPSMGSSDSTRSISGMRARDLITDTDVNLLNIDALESKYFPADSTFTLSVWFENLIPPEIEAILPTTDAQLNYISFTSRLASVLKHKESNDSEKSAYVVPCEHSASVTRRRERFAGVMAKFLDLHEILKDA

SEQ ID NO: 62 - protein, 269 aa, Varicella zoster
MSRRTYVRSERRRGCGDNLLQRIRLVVPSALQCCDGDLPIFDPQRPPARCVFQFNGEDNVSEAFPVEYIMRLMANWAQVDCDPYIKIQNTGVSVLFQGFFFRPTNAPVAEVSIDSNNVILSSTLSTGINLSALESIKRGGGIDRRPLQALMWVNCFVRMPYVQLSFRFMGPEDPSRTIKLMARATDAYMYKETGNNLDEYIRWRPSFRSPPENGSPNTSVQMQSDIKPALPDTQTTRVWKLALPVANVTYALFIVIVLVVVLGAVLFWK

SEQ ID NO: 63 - protein, 235 aa, Varicella zoster
MTQPASSRVVFDPSNPTTFSVEAIAAYTPVALIRLLNASGPLQPGHRVDIADARSIYTVGAAASAARARANHNANTIRRTAMFAETDPMTWLRPTVGLKRTFNPRIIRPQPPNPSMSLGISGPTILPQKTQSADQSALQQPAALAFSGSSPQHPPPQTTSASVGQQQHVVSGSSGQQPQQGAQSSTVQPTTGSPPAAQGVPQSTPPPTQNTPQGGKGQTLSHTGQSGNASRSRRV

SEQ ID NO: 64 - protein, 483 aa, Varicella zoster
MGSQPTNSHFTLNEQTLCGTNISLLGNNRFIQIGNGLHMTYAPGFFGNWSRDLTIGPRFGGLNKQPIHVPPKRTETASIQVTPRSIVINRMNNIQINPTSIGNPQVTIRLPLNNFKSTTQLIQQVSLTDFFRPDIEHAGSIVLILRHPSDMIGEANTLTQAGRDPDVLLEGLRNLFNACTAPWTVGEGGGLRAYVTSLSFIAACRAEEYTDKQAADANRTAIVSAYGCSRMETRLIRFSECLRAMVQCHVFPHRFISFFGSLLEYTIQDNLCNITAVAKGPQEAARTDKTSTRRVTANIPACVFWDVDKDLHLSADGLKHVFLVFVYTQRRQREGVRLHLALSQLNEQCFGRGIGFLLGRIRAENAAWGTEGVANTHQPYNTRALPLVQLSNDPTSPRCSIGEITGVNWNLARQRLYQWTGDFRGLPTQLSCMYAAYTLIGTIPSESVRYTRRMERFGGYNVPTIWLEGVVWGGTNTWNECYY

SEQ ID NO: 65 - protein, 775 aa, Varicella zoster
MEFKRIFNTVHDIINRLCQHGYKEYIIPPESTTPVELMEYISTIVSKLKAVTRQDERVYRCCGELIHCRINLRSVSMETWLTSPILCLTPRVRQAIEGRRDEIRRAILEPFLKDQYPALATLGLQSALKYEDFYLTKLEEGKLESLCQFFLRLAATVTTEIVNLPKIATLIPGINDGYTWTDVCRVFFTALACQKIVPATPVMMFLGRETGATASCYLMDPESITVGRAVRAITGDVGTVLQSRGGVGISLQSLNLIPTENQTKGLLAVLKLLDCMVMAINSDCERPTGVCVYIEPWHVDLQTVLATRGMLVRDEIFRCDNIFCCLWTPDLFFERYLSYLKGASNVQWTLFDNRADILRTLHGEAFTSTYLRLEREGLGVSSVPIQDIAFTIIRSAAVTGSPFLMFKDACNRNYHMNTQGNAITGSNLCTEIVQKADAHQHGVCNLASINLTTCLSKGPVSFNLNDLQLTARTTVIFLNGVLAAGNFPCKKSCKGVKNNRSLGIGIQGLHTTCLRLGFDLTSQPARRLNVQIAELMLYETMKTSMEMCKIGGLAPFKGFTESKYAKGWLHQDGFSTISYLDLPWCTLRDDICAYGLYNSQFLALMPTVSSAQVTECSEGFSPIYNNMFSKVTTSGELLRPNLDLMDELRDMYSCEEKRLEVINILEKNQWSVIRSFGCLSNSHPLLKYKTAFEYEQEDLVDMCAERAPFIDQSQSMTLFIEERPDGTIPASKIMNLLIRAYKAGLKTGMYYCKIRKATNSGLFAGGELTCTSCAL

SEQ ID NO: 66 - protein, 306 aa, Varicella zoster
MDQKDCSHFFYRPECPDINNLRALSISNRWLESDFIIEDDYQYLDCLTEDELIFYRFIFTFLSAADDLVNVNLGSLTQLFSQKDIHHYYIEQECIEVVHARVYSQIQLMLFRGDESLRVQYVNVTINNPSIQQKVQWLEEKVRDNPSVAEKYILMILIEGIFFVSSFAAIAYLRNNGLFVVTCQFNDLISRDEAIHTSASCCIYNNYVPEKPAITRIHQLFSEAVEIECAFLKSHAPKTRLVNVDAITQYVKFSADRLLSAINVPKLFNTPPPDSDFPLAFMIADKNTNFFERHSTSYAGTVINDL

SEQ ID NO: 67 - protein, 408 aa, Varicella zoster
MDLRSRTDDALDMELHAGFDAPEIARAVLTEKTLTGLISSISPLVNRLRDSILIFSDEGLIIHCSLETEQLYIPIPANMFDQYNWTGPRMVVLAATEGRSSLIDAFRHTKDPSTPTRLYFKFTGQPPERSIIQTMVWQRPGDCGPDDQVQCYKQVVKRELACYTMMFPNLTPDISICLKRDQFTRLQRLLKTFGFTTCFILTATDMYIQTAGGGFISFNVSLDINGSKPTPYNLIRSITNSKRILNNVVYGSGSMREFGVLLETHSGFRSAVQNLKLTRDETCYINFYLALTNSPMVGLYIQRSAPVHSFFYATFLSPKDLKEKLTSMQLFANMESVKDEPPLKKRRNLLTKRNEKNTGNKMGGKLPETTWQEGIGIREYCVAPPVDPAGTLDYSELSRESDVICTVK

SEQ ID NO: 68 - protein, 406 aa, Varicella zoster
MAVNGERAVHDENLGVLDRELIRAQSIQGCVGNPQECNSCAITSASRLFLVGLQASVITSGLILQYHVCEAAVNATIMGLIVVSGLWPTSVKFLRTLAKLGRCLQTVVVLGFAVLWAVGCPISRDLPFVELLGISISAITGTVAAVHIHYYNFVTTFNGPHIYFYVMMLGTGLGGLLTVILYMYVSKYEVLIGLCISIVTLVSIVDAATDLQDTCIYRKNRHKQLNTYTDLGFAVVYTQNDRGRVCDHRESSRTLKRVFKGIRIMSVIPPVLYIVTPLMWAISHIIKLNHFIKLTQVTLAVSIGGHIIAFGLQGFAVLYQEKKNLWVIVLYTTTSVTGIAVTFAGISWGAIIILTSTVAAGLTCIQMMRLSVKPIDCFMASHITKVYHVCVYIIINLCYLCGTYVS

SEQ ID NO: 69 - protein, 560 aa, Varicella zoster
MKRIQINLILTIACIQLSTESQPTPVSITELYTSAATRKPDPAVAPTSAASRKPDPAVAPTSAASRKPDPAVAPTSAASRKPDPAVAPTSAATRKPDPAVAPTSAASRKPDPAVAPTSAATRKPDPAVAPTSAASRKPDPAANTQHSQPPFLYENIQCVHGGIQSIPYFHTFIMPCYMRLTTGQQAAFKQQQKTYEQYSLDPEGSNITRWKSLIRPDLHIEVWFTRHLIDPHRQLGNALIRMPDLPVMLYSNSADLNLINNPEIFTHAKENYVIPDVKTTSDFSVTILSMDATTEGTYIWRVVNTKTKNVISEHSITVTTYYRPNITVVGDPVLTGQTYAAYCNVSKYYPPHSVRVRWTSRFGNIGKNFITDAIQEYANGLFSYVSAVRIPQQKQMDYPPPAIQCNVLWIRDGVSNMKYSAVVTPDVYPFPNVSIGIIDGHIVCTAKCVPRGVVHFVWWVNDSPINHENSEITGVCDQNKRFVNMQSSCPTSELDGPITYSCHLDGYPKKFPPFSAVYTYDASTYATTFSVVAVIIGVISILGTLGLIAVIATLCIRCCS

SEQ ID NO: 70 - protein, 396 aa, Varicella zoster
MNEAVIDPILETAVNTGDMFCSQTIPNRCLKDTILIEVQPECADTLQCVLDDKVSRHQPLLLRNHKKLELPSEKSVTRGGFYMQQLELLVKSAPPNEYALLLIQCKDTALADEDNFFVANGVIDAGYRGVISALLYYRPGVTVILPGHLTIYLFPVKLRQSRLLPKNVLKHLDPIFKSIQVQPLSNSPSNYEKPVIPEFADISTVQQGQPLHRDSAEYHIDVPLTYKHIINPKRQEDAGYDICVPYNLYLKRNEFIKIVLPIIRDWDLQHPSINAYIFGRSSKSRSGIIVCPTAWPAGEHCKFYVYNLTGDDIRIKTGDRLAQVLLIDHNTQIHLKHNVLSNIAFPYAIRGKCGIPGVQWYFTKTLDLIATPSERGTRGFGSTDKETNDVDFLLKH

SEQ ID NO: 71 - protein, 1083 aa, Varicella zoster
MDKSSKPTIRLLFATKGCAISHSLLLLTGQISTEPLYVVSYTWTPDLDDVFVKNGREEITQVIPTKRPREVTENDEENQIMHLFCSRDVNVIFYLIGGFSTGDVRSRVWPIFFCCFKTQTDFKALYKALWYGAPLNPHIISDTLCISETFDIHSEVIQTLMVTTHHLNRKGLSDNGLCITEATLCKLVKKSVGRQELTSLYAHYERQVLAAYRRLYWGYGCSPFWYIVRFGPSEKTLVLATRYYLLQTDTSYNTLETPLYDLQAIKDLFLTYQVPALPNCSGYNISDLLSFDKLSMFCCSSTYTRGLTAKNALSYILQRIHTDTTEIHAVSEYITNDRKGLKVPDREFVDYIYLAHFECFNRKQIADHLQAVTYSDFVNKPVLLKSSNLGKRATANFFNHVRSRLNMRDYIKKNVICDVTELGPEIGHKYTITKTYTLSLTYAAKPSKFIGVCDLATTLTRRVENIEKQFSPYGWSSTIPSNPPGFDELSNFEDSGVSAEALRAANFANDTPNQSGRTGFDTSPGITKLLLFFSAATGIATHDVSILSYKTPLEALIGHSEVTGPMPVYRVALPHGAQAFAVIANDTWSSITNRYTLPHEARLIAEDLKQINPCNFVAASLRDMQLTLLLSTSVKNVSKISSNIPKDQLYINRNELFNTNLIITNLILDVDFHIRKPIPLGILHAGMRAFRHGILTAMQLLFPKAVVNPNKDPCYFYKTACPEPTVEVLDDDNLLDITSHSDIDFYIENGELYTCVEENYTEDVWFFDTQTTSEVHTHADVSNNENLHETLPCNCKEKIGFRVCVPIPNPYALVGSSTLKGFAQILQQAVLLEREFVEYIGPYLRDFSFIDTGVYSHGHSLRLPFFSKVTTTGTAVGQLLPFYVVPEQCIDILAFVTSHRNPANFHFHSRPQSNVPVQFILHNLGGEYAEFFERKVARNKQIFSSPQISLTKALKERGVTCLDAFTLEAFVDSTILESIVEHIAVHFPGRDREYTLTSSKCIAIKRDWVLFQLICGTKGFTCLRYPHRGGRTAPRTFVSLRVDHHNRLCISLAQQCFATKCDSNRMHTIFTLEVPNYPNLTSS

SEQ ID NO: 72 - protein, 340 aa, Varicella zoster
MQALGIKTEHFIIMCLLSGHAVFTLWYTARVKFEHECVYATTVINGGPVVWGSYNNSLIYVTFVNHSTFLDGLSGYDYSCRENLLSGDTMVKTAISTPLHDKIRIVLGTRNCHAYFWCVQLKMIFFAWFVYGMYLQFRRIRRMFGPFRSSCELISPTSYSLNYVTRVISNILLGYPYTKLARLLCDVSMRRDGMSKVFNADPISFLYMHKGVTLLMLLEVIAHISSGCIVLLTLGVAYTPCALLYPTYIRILAWVVVCTLAIVELISYVRPKPTKDNHLNHINTGGIRGICTTCCATVMSGLAIKCFYIVIFAIAVVIFMHYEQRVQVSLFGESENSQKH

SEQ ID NO: 73 - protein, 452 aa, Varicella zoster
MASASIPTDPDVSTICEDFMNLLPDEPSDDFALEVTDWANDEAIGSTPGEDSTTSRTVYVERTADTAYNPRYSKRRHGRRESYHHNRPKTLVVVLPDSNHHGGRDVETGYARIERGHRRSSRSYNTQSSRKHRDRSLSNRRRRPTTPPAMTTGERNDQTHDESYRLRFSKRDARRERIRKEYDIPVDRITGRAIEVVSTAGASVTIDSVRHLDETIEKLVVRYATIQEGDSWASGGCFPGIKQNTSWPELMLYGHELYRTFESYKMDSRIARALRERVIRGESLIEALESADELLTWIKMLAAKNLPIYTNNPIVATSKSLLENLKLKLGPFVRCLLLNRDNDLGSRTLPELLRQQRFSDITCITTYMFVMIARIANIVVRGSKFVEYDDISCNVQVLQEYTPGSCLAGVLEALITHQRECGRVECTLSTWAGHLSDARPYGKYFKCSTFNC

SEQ ID NO: 74 - protein, 179 aa, Varicella zoster
MDTTGASESSQPIRVNLKPDPLASFTQVIPPLALETTWTCPANSHAPTPSPLYGVKRLCALRATCGRADDLHAFLIGLGRRDKPSESPMYVDLQPFCSLLNSQRLLPEMANYNTLCDAPFSAATQQMMLESGQLGVHLAAIGYHCHCKSPFSAECWTGASEAYDHVVCGGKARAAVGGL

SEQ ID NO: 75 - protein, 108 aa, Varicella zoster
MSRVSEYGVPEGVRESDSDTDSVFMYQHTELMQNNASPLVVQTRPPAVLIPLVDVPRPRSRRKASAQLKMQMDRLCNVLGVVLQMATLALVTYIAFVVHTRATSCKRE

SEQ ID NO: 76 - DNA, 5743 bp, Varicella zoster
  CDS (1)..(1056)
  CDS (4556)..(5740)
atgtcattgataatgtttggtcgtacgcttggtgaagaatctgtaagatattttgaacgtctaaagcgtcgtagggatgaacgctttgggacgttggagtcccctaccccgtgttccacgcggcaagggtctctgggaaacgcaacccaaatcccgtttctgaattttgctatagatgtaacccgacgtcatcaggccgttattcccggaattggaacgcttcacaactgttgtgaatatattccactgttctcggctactgctcgacgggcaatgtttggcgcgtttctatcgtcaacagggtacaactgtacccccaatgtagttttgaaaccatggcgatattcggtaaatgcaaacgtaagccctgaattaaaaaaggctgtcagtagtgtacagttttatgaatattcaccggaagaagcagcacctcatcgaaatgcgtatagcggtgttatgaacacatttcgcgcgttttctctgtcggatagtttctgtcagttgtctacctttacacaacggttttcgtaccttgtggaaacatcttttgagagtattgaagagtgtggaagtcatggcaaacgcgcaaaggttgacgttccaatctatggcagatataaggggacgttggaactgtttcaaaaaatgatcctcatgcacaccacgcattttatttcatcggtgctattgggcgatcatgccgacagagttgactgctttctgcgtacagtgtttaacacgccaagtgtttctgacagtgttttagaacacttcaaacaaaaatcaactgtgtttttggtaccacgtagacatgggaaaacatggtttcttgtaccattaatagctttagtaatggccacgtttagaggaattaaagtgggttatacggctcatatacgcaaagcaacggaacccgtgtttgagggtatcaagtctcgcctggaacagtggtttggggcaaattacgtggatcatgtaaaaggcgaatctattacgttttcatttaccgacgggtcttacagcacagcggtgttcgcgtcaagtcacaacacaaacgtgagtgttttataaatttaacctttaatatattactgtaaatgttgacatatacctttccacaacggcggttgagttaaggtatactaggtggttgtaggttccggttcacccgataatctttgtgtctcggggaagcaaattcgctgaagcagaccacagccgttaataatagcccggcttaatgtttctccaaacatataaagctgccacccagatgaatttactggtacagagagaccactggcgttggttcccgctataacgtcgccaagatttgcggtaatgcgaggatttttagtactcgtaattcgaatgcaggtggtgacatctacaaaaagaacctgcgtggcgccaatgtctacctccacttttaattcccgctgaccggcctttctccacatacacggagcccaacacacacaaccttccgcatgatttgtgacatggggtaacgcatacagtgcccccacgtgaactctatgattacattcatcacatccgtccgcatggctgaggagtcgatttaatacagagccaagtatccgagcatgccatccggcgggacatagccctattaaattaggttccatagccagtacatataaacgccttcgttcgtctgaccaccacactcccggagaaataactttacatgcgtatggatttttcggaagccgcgggggttgtaagtagttgcttaagtttggcgttggtgtaagatctgcgggggtgggatctgctcgaggatccggaatagatgttggaagggggtacgcgatcgggttcttaaacgttgctccaaaaacatggtctatgttttcaaccggataaattcttaaagtcgccgtcattgcgtacgagacctcgtaattaaaatttacaattacatgaaaagtcttcggaggtaagttcatctgacgtgggcgcgtgatgtaaattgtggctacaacaacggcaatattagtagtatccgtttgaagggggataaacggagcgatccttaaagttataaaagcagttgatcgcattattttcacccggggatcggtcaggatggacttccataatcccatatccagcgttaatgcatcgcagagtctctgaactgcctcgggggttaatttgcgcgctgcacccgtagcggtgtacagcggaaatatgcgttgtaattccatgagcagaaaaacagtctagcggattgccgcccgggtacttgtgggtttaatgccacccacccggttattttatattttaagagggggtggaaacgggagaaatgacgtaaaattacatatgaagagattctggtgttatgtttttatagtgacactaatttatttatgggggttgggaatagagaagcagaatctgtctagaataggtccgattaacgatgcaggtagtgctgcctgtagggtatcggtaatacaaaaacatgccgcaaatccccccggtaaaactaaaatggattgtaattgctggttaaatcctagacaaatgtacgcgtaacattgaccgggtaaatacttagaacaaattccaatatcaacaatatccgcgctgcgtataaatttacccctcagttgtgtggaattaccaataccaaccttttctaaggctacgggaacggggaccttggaaagcttaagtatttcccctcctgaattataatagtcaaataaatatatagaacgattacctaaccagcatgggaaggaagcgtgaaggtagggtatataccccccaccttgtggtcgtgtatatacagatgacagatacgccaaaaccgcatacatcaaggagctgttataaaacgcatccattgacatttccgttaacaccgaaactatagtctgaatcaggtctggtgtgcgggctacaatttcatcaataaccgtttgggaagaatctgcaatatcatattccatgagttgttgtagagtcgggttcgtttgtaactccgttataagaccttgggttagcgatgtcacacacgcttgtttaaatacctggtttaaaaacatttcggcgcctggtttaaaggcgggtaagggggtttgattatttaggacgttagccaaaaacggtaaacgcgcgactagctcttggcgagctgtcacatgtaggctttggggattgtcaacccgggcatttatacacgcagcatcaataatagcctgtgcagagtgatataaaattggacttccggtaatacgtcctccccaggcagaggatccgttgtaagatactacaatcaacggactgggggattctgcgtaatgtcgcggtacaattgataggggacgccgtttccagaaatctgctggagtgtccccgctaactaattgggcataacagatgtcgaaccattccataagactttggggttctgtcgaagctggggtaaacaatagaacgtcttgtaaaggtgggatgctggcggacgaattgtttttctttcccgtaaatcgcccttgtccaggcggctcaaggacgccatcaaaggaaccgttattgatcggatctgtgttggaagtttgcgctccgtggccctttgcactttgaagcaacccagatgcaacgcgggaactagaaggtcggacggggtgcctggagttaacaatgtttacggcccgttttattagctcaaggacgtcccgattattttcctgtatgcgtgtttcagcaggggagtcatcaatacctccagaagttaactgtcgatcaagatcgattatggatgaaacgggtccaatattgtccccatttgacgtgtgtgattcacccatggctgccaccatatgctctgcgtatatttttatagacgatgcaagacgaggggtgcatcggatatacgcaatcagctgtttgcataataaaagtacccgttgtccatcagcaaaataacgcgttccgtttgggattagttctgcatacataatacaaatatcacggtgcttgcggtttccagtatttattcgtatcgctacaacgttaaatgcatcaaagaataaaccggggctaagataaacaggcaatgataaaatcaatccccctgaattatgcgtggccgaaaaaacgtgtgaaacaaatggttccgtttttggtattaagagatttgttaaggcgttatcgggaatgtacgcggcgaaaacttgacaccacggttcgcattgacctgtagcatgatatcttgtttgtacttcaaccttgaagcgttgtccgggtttctttaaaatcagtaatgcgggatctattccggccgcaataagccccgcgttaggtatcacaacgtgtagtaatccttttgtgtgatcattatgccaaagtgcatgtttggtttcatttgccaaatgggcttccattatacaccggatatggttgtactggaaaaaaaaaagaaatatgtacgtattcaaacattttttacgtacgtggtatttaaggatacatttaaactttggtggggtaactatatatctttctatcgttccagggtatccgaggtcaagattttaatcttctgtttgtggatgaagctaattttattcgacctgatgctgtacaaactatagtcggatttttaaatcaaaccaattgtaaaattatttttgtttcatcaacaaataccggaaaagcaagtacaagttttttgtataacttacgtggatcgtcggatcagttgttaaacgttgttacatatgtatgcgacgatcacatgccgcgtgttttagcacatagcgatgtcacagcttgttcgtgttatgtattaaataagccggttttcatcacaatggatggagccatgcggcgcactgcagatttatttatggccgactccttcgtgcaggaaattgtaggtgggcgtaaacagaattctgggggtgtggggtttgaccggccattatttacaaaaactgcccgtgagaggtttattttatatcggccgtcaaccgttgcgaattgtgctatattatcgtcagtgttgtacgtttacgtagaccctgcatttacctcaaatacacgagcgtctggtactggtgtagcgattgttggtcgttataagtcggattggattatatttggattggagcacttttttcttagagctttaactggcacgtcttccagtgagatagggcgttgcgttactcaatgcttaggccacatactcgctttacaccccaatacatttacaaacgtacacgtttctatagagggaaacagcagccaggattctgcagttgccatatcgttggctatagcacaacagtttgctgtcctcgaaaagggaaacgtgctatcttccgctccagtgttactgttttatcattccatacctcccggatgtagcgtggcgtaccctttttttttattacaaaaacaaaaaacgccggccgtagactattttgttaaacgatttaactccggaaatataatagcctcacaggagcttgtatccctaacagtaaagttaggtgtagaccccgtggagtatctatgtaaacagttggataacctgacagaggtaattaaaggcggtatgggtaatctagacacaaaaacttacacgggtaaaggtaccacgggaacaatgtcagatgatctgatggttgcattaattatgtccgtgtatattggcagttcatgtataccggattccgtgtttatgcctattaaataa

SEQ ID NO: 77 - protein, 747 aa, Varicella zoster
MSLIMFGRTLGEESVRYFERLKRRRDERFGTLESPTPCSTRQGSLGNATQIPFLNFAIDVTRRHQAVIPGIGTLHNCCEYIPLFSATARRAMFGAFLSSTGYNCTPNVVLKPWRYSVNANVSPELKKAVSSVQFYEYSPEEAAPHRNAYSGVMNTFRAFSLSDSFCQLSTFTQRFSYLVETSFESIEECGSHGKRAKVDVPIYGRYKGTLELFQKMILMHTTHFISSVLLGDHADRVDCFLRTVFNTPSVSDSVLEHFKQKSTVFLVPRRHGKTWFLVPLIALVMATFRGIKVGYTAHIRKATEPVFEGIKSRLEQWFGANYVDHVKGESITFSFTDGSYSTAVFASSHNTNGIRGQDFNLLFVDEANFIRPDAVQTIVGFLNQTNCKIIFVSSTNTGKASTSFLYNLRGSSDQLLNVVTYVCDDHMPRVLAHSDVTACSCYVLNKPVFITMDGAMRRTADLFMADSFVQEIVGGRKQNSGGVGFDRPLFTKTARERFILYRPSTVANCAILSSVLYVYVDPAFTSNTRASGTGVAIVGRYKSDWIIFGLEHFFLRALTGTSSSEIGRCVTQCLGHILALHPNTFTNVHVSIEGNSSQDSAVAISLAIAQQFAVLEKGNVLSSAPVLLFYHSIPPGCSVAYPFFLLQKQKTPAVDYFVKRFNSGNIIASQELVSLTVKLGVDPVEYLCKQLDNLTEVIKGGMGNLDTKTYTGKGTTGTMSDDLMVALIMSVYIGSSCIPDSVFMPIK

SEQ ID NO: 78 - DNA, 1308 bp, Varicella zoster
  CDS (1)..(1308)
atgggaactcaaaagaaggggccgcgttctgaaaaagtctcgccgtacgacaccacgacacccgaggtggaagcgttagatcatcaaatggatacgcttaattggcgaatttggataattcaggtgatgatgttcactttgggtgcggtaatgctcctggctacgttaattgccgcctcttctgaatataccgggatcccttgtttttatgctgccgtagttgattatgagttatttaacgccaccctagatgggggggtatggtccggaaatagaggtggatacagcgccccggttttgtttttggaaccacatagcgttgtggcatttacttactacacggctttaacggcaatggccatggcggtatatacactgatcacggccgcgattatacaccgagaaacgaaaaatcaacgtgtccggcaaagctccggtgttgcatggttagttgtagatcccacaacacttttttggggtcttttgtcattgtggttattaaacgccgttgtgttattattagcttacaagcaaatcggcgtggctgctacattatatcttggacattttgcgacaagtgtaatatttacaacgtatttttgtggacgcggaaaattggacgaaacgaacataaaagcggtcgcaaatttacgacagcagagcgtctttttatatcgccttgcggggcctacgcgcgcagtgttcgtgaatttgatggctgcgttgatggcgatatgtatcctatttgtatcattaatgctggaacttgtggtggcgaatcatctacatacgggactgtggtcatcggtgtccgtggccatgtctacatttagtacattgtcagttgtatatcttatagtatcagaattaattttggcgcattatatacacgtgttaataggaccgtccctgggaacgctcgtggcctgtgctacgttgggaaccgccgcgcactcgtatatggaccgattatatgaccctatatcggttcaatctccacggttaattcccacaactcggggaaccttggcttgcctggccgtgttttccgttgtcatgttgcttctcagattgatgcgtgcatatgtgtatcatcgacagaaacgcagtcggttctacggtgccgtaagaagagtacccgagcgggtacggggatacatacgaaaagtaaaacctgcacatagaaattctcgccgcacaaattacccatcacaaggctacggctacgtctatgaaaatgactcaacatatgaaacggaccgcgaggatgagctgttatacgagcgatcaaacagtgggtgggagtag

SEQ ID NO: 79 - protein, 435 aa, Varicella zoster
MGTQKKGPRSEKVSPYDTTTPEVEALDHQMDTLNWRIWIIQVMMFTLGAVMLLATLIAASSEYTGIPCFYAAVVDYELFNATLDGGVWSGNRGGYSAPVLFLEPHSVVAFTYYTALTAMAMAVYTLITAAIIHRETKNQRVRQSSGVAWLVVDPTTLFWGLLSLWLLNAVVLLLAYKQIGVAATLYLGHFATSVIFTTYFCGRGKLDETNIKAVANLRQQSVFLYRLAGPTRAVFVNLMAALMAICILFVSLMLELVVANHLHTGLWSSVSVAMSTFSTLSVVYLIVSELILAHYIHVLIGPSLGTLVACATLGTAAHSYMDRLYDPISVQSPRLIPTTRGTLACLAVFSVVMLLLRLMRAYVYHRQKRSRFYGAVRRVPERVRGYIRKVKPAHRNSRRTNYPSQGYGYVYENDSTYETDREDELLYERSNSGWE

SEQ ID NO: 80 - DNA, 2310 bp, Varicella zoster
  CDS (1)..(2310)
atggccgaaataacgtctctttttaataacagttccggtagtgaagaaaaaaggatagcaagttctgtttctattgaccagggcttgaatggaagtaacccaaatgaccaatacaagaacatgttcgatatatactggaatgagtacgccccggatatagggttttgtacatttccggaggaagatggctggatgttaatacacccaaccacgcaaagtatgttgtttcgaaaaatcctagccggtgactttggatataccgatggacaaggcatatatagcgctgtacggtctacggaaactgtaattcgccaagttcaggcaaccgttttgatgaacgcgttggatgcaactcggtatgaggacctagcagcagattgggaacaccacatccaacaatgtaacctgcatgccggggctctagcggaacgttatgggctatgtggagaatcagaagccgtacggcttgcacatcaggtttttgaaacctggcgtcaaacattacagtcatcgttacttgagtttctgcgtggaataaccggttgtctctataccagtggtttaaatggaagggtcggttttgccaaatacgtggactggatagcctgtgtaggtattgtgcccgttgtaagaaaggtacgatcagaacagaatggaacccctgcaccattaaatacgtatatgggtcaagcggcagaactgtcccagatgttaaaagttgccgatgcaacgttggccagaggagcggcggttgtcacaagcctagttgagtgtatgcaaaatgttgctattatggattatgataggacgcgtctttattataattataaccgaagattaattatggcaaaggatgatgtaacgggcatgaagggagagtgtttggtcgtgtggccgcccgttgtatgtggggagggtgtagtatttgactcacccttacagcggctttctggggaggtgttggcctgttatgcattacgtgaacatgctcgcgtctgccaagttttaaatacagcccctttgcgcgtgttaataggtcgccggaatgaagatgatagatctcacagcacacgtgcggttgatcgtataatgggcgagaacgatacaacacgggctggatcggccgcgtctagacttgtaaagctaatagttaacttaaaaaacatgagacatgttggagatattaccgaaaccgtacgttcctatctagaagaaacgggcaatcacattctggaaggaagtggatcggtggacacatcacaaccggggtttggcaaggccaaccaatcctttaacgggggggcaatgtccggaacaacaaacgttcaaagtgcgtttaaaacttcggtggttaacagtatcaacggcatgctcgagggttatgtgaataatttattcaaaaccattgagggtctcaaggatgtgaacagcgatctgaccgaaaggctccagttcaaagaaggagagctgaaacggttacgggaagagagggtaaaaataaagccatctaaagggtcacatattacaatggcagaagaaacacgtattgccgatttaaatcacgaggttatagatcttaccggcataataggggatgatgcatatattgccaatagttttcaatctcgttatatccccccttatggagatgatataaaacgtttgtctgagctatggaaacaggaacttgttcgctgttttaagcttcaccgggtaaacaataatcaaggccaggaaatttctgtatcatattcaaatgcgtcaatctcattactagttgcgccgtatttttcattcatattacgggccacccgattaggattcttggtaactcaaagcgaggtacataggtcagaggaagagttatgccaggctatttttaaaaaggcgagaacagagtcctatttatcccaaatccgaatattatatgaaatgcaggttcgcgcagaggtaataaaacggggcccacggagaacaccaagtccttcctggggtttgcctgaccctacagaagatgacgaaagaatcccggaacccaataaaataaataaccaatacatgcatgttggatataaaaacctatcccattttatgaaaggacacccccctgagaggttacgggtacacaaggtaaatgcagcggattcgaccttactggataaaattcgagcaaaccggaggcgcggggatggccgatgggatgtccggaataaatatacccagcattttaggttgcagcgtaacgatcgacaacttactaacacgagccgaagaggggttggatgtgagcgacgtgatcgaagatcttag

SEQ ID NO: 81 - protein, 769 aa, Varicella zoster
MAEITSLFNNSSGSEEKRIASSVSIDQGLNGSNPNDQYKNMFDIYWNEYAPDIGFCTFPEEDGWMLIHPTTQSMLFRKILAGDFGYTDGQGIYSAVRSTETVIRQVQATVLMNALDATRYEDLAADWEHHIQQCNLHAGALAERYGLCGESEAVRLAHQVFETWRQTLQSSLLEFLRGITGCLYTSGLNGRVGFAKYVDWIACVGIVPVVRKVRSEQNGTPAPLNTYMGQAAELSQMLKVADATLARGAAVVTSLVECMQNVAIMDYDRTRLYYNYNRRLIMAKDDVTGMKGECLVVWPPVVCGEGVVFDSPLQRLSGEVLACYALREHARVCQVLNTAPLRVLIGRRNEDDRSHSTRAVDRIMGENDTTRAGSAASRLVKLIVNLKNMRHVGDITETVRSYLEETGNHILEGSGSVDTSQPGFGKANQSFNGGAMSGTTNVQSAFKTSVVNSINGMLEGYVNNLFKTIEGLKDVNSDLTERLQFKEGELKRLREERVKIKPSKGSHITMAEETRIADLNHEVIDLTGIIGDDAYIANSFQSRYIPPYGDDIKRLSELWKQELVRCFKLHRVNNNQGQEISVSYSNASISLLVAPYFSFILRATRLGFLVTQSEVHRSEEELCQAIFKKARTESYLSQIRILYEMQVRAEVIKRGPRRTPSPSWGLPDPTEDDERIPEPNKINNQYMHVGYKNLSHFMKGHPPERLRVHKVNAADSTLLDKIRANRRRGDGRWDVRNKYTQHFRLQRNDRQLTNTSRRGVGCERRDRRS

SEQ ID NO: 82 - DNA, 666 bp, Varicella zoster
  CDS (1)..(666)
atgttttcggagttgcctccttccgtaccgacggcattgcttcaatggggttggggattgcatcgtggaccgtgttcgatcccaaattttaaacaggtagccagccaacacagtgttcagaacgattttacagaaaatagcgttgatgcaaatgaaaaatttccgattgggcacgcgggctgtattgagaaaaccaaagacgactatgtaccatttgatacgttgttcatggtatcatctattgacgaacttgggcggagacaattaaccgacaccatccgccgcagcttggttatgaacgcctgtgaaataacggtcgcgtgtacgaaaaccgcagccttttctggtcgaggcgtgtcacgacaaaaacacgtgaccctatctaaaaataaattcaatccatccagtcataagagcctgcaaatgtttgtgttgtgtcaaaaaacccatgcaccccgtgtcagaaacctactgtacgagagtattcgtgcaagaagacctcgccgatattacacccgctcaacggacggaaaatcgcgtccgttggtaccagtgtttgtgtatgagtttacggctttagatcgtgtccttttacataaggaaaatactttgaccgaccaaccaattaatactgaaaatagcggtcatggacgtacgagaacgtaa

SEQ ID NO: 83 - protein, 221 aa, Varicella zoster
MFSELPPSVPTALLQWGWGLHRGPCSIPNFKQVASQHSVQNDFTENSVDANEKFPIGHAGCIEKTKDDYVPFDTLFMVSSIDELGRRQLTDTIRRSLVMNACEITVACTKTAAFSGRGVSRQKHVTLSKNKFNPSSHKSLQMFVLCQKTHAPRVRNLLYESIRARRPRRYYTRSTDGKSRPLVPVFVYEFTALDRVLLHKENTLTDQPINTENSGHGRTRT

SEQ ID NO: 84 - DNA, 480 bp, Varicella zoster
  CDS (1)..(480)
atggcatcacataaatggttactgcagatagtttttttaaaaactatcacaatcgcgtattgtcttcatctccaagacgacactccgttgttttttggagccaaaccgctatcggatgtgagtttgattataacggaaccgtgcgtgtcatcggtatatgaggcgtgggactatgcggcacccccggtatcaaacctcagcgaggcgctatcgggaatcgtggttaagacaaaatgtccagtaccggaagttatactttggtttaaagacaaacaaatggcgtactggacaaatccatacgtcaccttaaaggggctggcacaatctgttggtgaagaacataaaagcggggacatacgcgatgctttgttggatgccctttccggtgtatgggtagactctactccatcttccacaaatatcccggaaaatggatgtgtctggggagccgaccgtttgttccaacgcgtatgccaatga

SEQ ID NO: 85 - protein, 159 aa, Varicella zoster
MASHKWLLQIVFLKTITIAYCLHLQDDTPLFFGAKPLSDVSLIITEPCVSSVYEAWDYAAPPVSNLSEALSGIVVKTKCPVPEVILWFKDKQMAYWTNPYVTLKGLAQSVGEEHKSGDIRDALLDALSGVWVDSTPSSTNIPENGCVWGADRLFQRVCQ

SEQ ID NO: 86 - DNA, 909 bp, Varicella zoster
  CDS (1)..(909)
atggcttctgtagcaggtaacgctagtaatatctcaccacagcccccgtcgggcgttccaaccggaggggaatttgtactgatacctaccgcgtattattcacagctgttaaccgggcagactaaaaatccgcaggtatcaattggagctccaaataacggacagtatatcgtcgggccatatggatctccacacccgcctgccttcccacctaatacagggggttatggttgccctccgggacacttcgggggaccgtacgggtttccgggatatccaccacccaatcgtttggaaatgcaaatgtccgcatttatgaacgcattggccgccgaacggggtattgacttgcagaccccgtgtgtaaattttccagacaaaaccgatgtccgtcgtccaggaaaacgggatttcaagagcatggatcaaagggaattggattctttttatagtggggagtctcaaatggacggagagtttccctcaaatatatattttcccggtgaaccaacgtatataacgcatcggagacgtcgagtttctccatcatattggcagaggagacacagagtttctaatggtcagcacgaagagcttgctggggttgtggcaaaactgcaacaggaggttacagagctaaaatcacaaaatgggacacaaatgcctttgtcgcaccatacaaatataccagaggggacacgggatcctcgaatatcgattttattaaaacagcttcaaagcgtttcgggtctatgctcatcccaaaatacaacaagcaccccacatacagatacagttggacaagatgtaaatgcagtggaggcgagttccaaggcccctttaatacaggggtccacggcagacgacgccgatatgtttgcaaatcagatgatggtggggcggtgttaa

SEQ ID NO: 87 - protein, 302 aa, Varicella zoster
MASVAGNASNISPQPPSGVPTGGEFVLIPTAYYSQLLTGQTKNPQVSIGAPNNGQYIVGPYGSPHPPAFPPNTGGYGCPPGHFGGPYGFPGYPPPNRLEMQMSAFMNALAAERGIDLQTPCVNFPDKTDVRRPGKRDFKSMDQRELDSFYSGESQMDGEFPSNIYFPGEPTYITHRRRRVSPSYWQRRHRVSNGQHEELAGVVAKLQQEVTELKSQNGTQMPLSHHTNIPEGTRDPRISILLKQLQSVSGLCSSQNTTSTPHTDTVGQDVNAVEASSKAPLIQGSTADDADMFANQMMVGRC

What is claimed is:

1. A recombinant varicella-zoster virus, wherein at least part of a BAC vector sequence is inserted into a non-essential region of a varicella-zoster virus genome,
wherein the non-essential region is selected from the group consisting of the following regions:
the region in the ORF of gene 13, the region in the ORF of gene 56, the region in the ORF of gene 57, the region in the ORF of gene 58, the region flanking the ORF of gene 13, the region flanking the ORF of gene 56, the region flanking the ORF of gene 57, and the region flanking the ORF of gene 58.

2. The recombinant varicella-zoster virus of claim 1, wherein at least two genes selected from the group consisting of gene 13, gene 56, gene 57, and gene 58 are deleted.

3. The recombinant varicella-zoster virus of claim 1 wherein at least three genes selected from the group consisting of gene 13, gene 56, gene 57, and gene 58 are deleted.

4. The recombinant varicella-zoster virus of claim 1, wherein the BAC vector sequence comprises recombinant protein dependent recombinant sequence.

5. The recombinant varicella-zoster virus of claim 1, wherein the BAC vector sequence comprises a gene from a virus selected from the group consisting of mumps virus, measles virus, rubella virus, West Nile virus, influenza virus, SARS coronavirus, and Japanese encephalitis virus.

6. The recombinant varicella-zoster virus of claim 1, wherein the BAC vector sequence comprises a gene from a virus selected from the group consisting of mumps virus, measles virus, and rubella virus.

7. The recombinant varicella-zoster virus of claim 6, wherein the BAC vector sequence comprises a gene from mumps virus, gene from measles virus, and gene from rubella virus.

8. The recombinant varicella-zoster virus of claim 6, wherein the gene from mumps virus is selected from the group consisting of HN gene, F gene, and N gene.

9. The recombinant varicella-zoster virus of claim 6, wherein the gene from measles virus is selected from the group consisting of H gene, F gene, and N gene.

10. The recombinant varicella-zoster virus of claim 6, wherein the gene from rubella virus is selected from the group consisting of C gene, E1 gene, and E2 gene.

11. The recombinant varicella-zoster virus of claim 1, wherein the varicella-zoster virus genome is derived from a wild type strain.

12. The recombinant varicella-zoster virus of claim 1, wherein the varicella-zoster virus genome is derived from a mutant strain.

13. The recombinant varicella-zoster virus of claim 1, wherein the varicella-zoster virus genome is derived from the Oka vaccine strain.

14. The recombinant varicella-zoster virus of claim 1, wherein the varicella-zoster virus genome has mutations in gene 62 and gene 6.

15. The recombinant varicella-zoster virus of claim 14, wherein gene 62 comprises at least the base substitutions of the following (a)-(d) in SEQ ID NO. 1:
(a) base substitution at position 2110 for G;
(b) base substitution at position 3100 for G;
(c) base substitution at position 3818 for C; and
(d) base substitution at position 4006 for G,
and, the gene 6 comprises at least a base substitution at position 5745 for G, in SEQ ID NO.: 4.

16. A pharmaceutical composition comprising the virus of claim 1.

17. The pharmaceutical composition of claim 16, wherein the composition is in the form of a vaccine.

18. A vector which is isolated from the recombinant varicella-zoster virus of claim 1.

19. A cell comprising the vector of claim 18.

20. The cell of claim 19, wherein the cell is a bacterial cell.

21. The bacterial cell of claim 20, wherein the bacteria is E. coli.

22. The cell of claim 19, wherein the cell is a mammalian cell.

23. The mammalian cell of claim 22, wherein the mammalian cell is derived from a human.

24. A virus produced by the mammalian cell of claim 22.

25. A pharmaceutical composition comprising the virus of claim 24.

26. A method to produce recombinant varicella-zoster virus, comprising:
introducing vector of claim 18 into a mammalian host cell; and
culturing the mammalian host cell to produce recombinant varicella-zoster virus.

27. The method of claim 26, wherein the mammalian host cell is derived from a human.

28. The method of claim 26, further comprising a step of recombination between the two recombinant protein dependent recombinant sequences.

29. A method to introduce a mutation into the vector of claim 18, comprising:
introducing the vector into a bacterial host cell;
introducing a plasmid vector comprising a fragment consisting of a portion of varicella-zoster virus genome into the bacterial host cell, wherein the fragment has at least one mutation;
culturing the bacterial host cell; and
isolating a vector having a BAC sequence from the cultured bacterial host cell.

30. A method to introduce a mutation into the vector of claim 18, comprising:
introducing the vector into a bacterial host cell;
introducing a first plasmid vector comprising a first fragment consisting of a portion of varicella-zoster virus genome into the bacterial host cell, wherein the first fragment has at least one mutation;
introducing a second plasmid vector comprising a second fragment consisting of a portion of varicella-zoster virus genome into the bacterial host cell, wherein the second fragment has at least one mutation, and the first fragment is different from the second fragment;
culturing the bacterial host cell; and
isolating a vector having a BAC vector sequence from the cultured bacterial host cell.

31. A nucleic acid cassette comprising a first fragment which can homologously recombine with the varicella-zoster virus genome in a bacterial cell, a BAC vector sequence, and a second fragment which can homologously recombine with the varicella-zoster virus genome in a bacterial cell,
wherein both ends of the BAC sequence are linked to the first fragment and the second fragment, respectively, and
wherein each of the first fragment and the second fragment are independently derived from a region selected from the group consisting of the following regions of varicella-zoster virus genome:
the region in the ORF of gene 13, the region in the ORF of gene 56, the region in the ORF of gene 57, the region in the ORF of gene 58, the region flanking the ORF of gene 13, the region flanking the ORF of gene 56, the region flanking the ORF of gene 57, the region flanking the ORF of gene 58, and the region in which gene 56, gene 57, and gene 58 are contiguous.

32. The nucleic acid cassette of claim 31, wherein the first fragment and the second fragment are at least 1 kb.

33. The nucleic acid cassette of claim 31, wherein the first fragment and the second fragment are at least 1.5 kb.

34. The nucleic acid cassette of claim 31, wherein the first fragment and the second fragment are at least 2 kb.

35. The nucleic acid cassette of claim 31, wherein the first fragment and the second fragment are at least 80% identical with a varicella-zoster virus genome sequence.

36. The nucleic acid cassette of claim 31, wherein the first fragment and the second fragment are derived from different regions.

37. The nucleic acid cassette of claim 31, wherein the BAC vector sequence comprises a recombinant protein dependent recombinant sequence.

38. The nucleic acid cassette of claim 31, wherein the BAC vector sequence comprises a selectable marker.

39. The nucleic acid cassette of claim 31, wherein the varicella-zoster virus genome is derived from a wild type strain.

40. The nucleic acid cassette of claim 31, wherein the varicella-zoster virus genome is derived from a mutant strain.

41. The nucleic acid cassette of claim 31, wherein the varicella-zoster virus genome is derived from the Oka vaccine strain.

42. The nucleic acid cassette of claim 31, wherein the BAC vector sequence comprises the nucleic acid sequence set forth in SEQ ID NO.: 3.
